(19) United States
(12) Patent Application Publication
(10) Pub. No.: US 2017/0044560 A1
(43) Pub. Date: Feb. 16, 2017

(54) COMPOSITIONS AND METHODS FOR REDUCING PATHOGEN-INDUCED CITRUS GREENING

(71) Applicant: Forrest Innovations Ltd., Caesarea (IL)

(72) Inventors: Nitzan PALDI, Moshav Bar Giora (IL); Humberto Freire BONCRISTIANI JUNIOR, Odenton, MD (US); Eyal MAORI, Rishon-LeZion (IL); Alon WELLNER, Herzlia (IL); Shaul ILAN, Nofit (IL)

(73) Assignee: Forrest Innovations Ltd., Caesarea (IL)

(21) Appl. No.: 15/306,095

(22) PCT Filed: May 4, 2015
(86) PCT No.: PCT/IL2015/050469

§ 371 Date: Oct. 23, 2016

Related U.S. Application Data
(60) Provisional application No. 61/988,234, filed on May 4, 2014.
(60) Provisional application No. 61/988,235, filed on May 4, 2014.
(60) Provisional application No. 61/988,246, filed on May 4, 2014.
(60) Provisional application No. 61/988,237, filed on May 4, 2014.
(60) Provisional application No. 61/988,236, filed on May 4, 2014.

(51) Int. Cl. C12N 15/82

(52) U.S. Cl. CPC C12N 15/8218; C12N 15/8261; C12N 15/8271; C12N 15/8243; C12N 15/8245; C12N 15/8273; C12N 15/827

(57) ABSTRACT

The present invention, in some embodiments thereof, relates to methods for enhancing fitness of pathogen-infected plants, and, more particularly, but not exclusively, to methods of using RNA interference for modulation of plant-pathogen resistance response gene expression. In particular, the present invention provides compositions and methods for enhancing host plant fitness and fruit yield and quality following Candidatus Liberibacter spp infection and, specifically, Candidatus Liberibacter spp infection in citrus plants and trees, as in Huang Long Bing.

### FIELD AND BACKGROUND OF THE INVENTION

[0001] Citrus huanglongbing (HLB), also known as “citrus greening” is possibly the most destructive disease of citrus. It is distributed throughout most citrus producing countries worldwide, where it generates substantial economic losses in heavily affected areas. The suspected causal agent of HLB is a fastidious, phloem-limited bacterium of the genus Candidatus Liberibacter. Three different bacterial species are associated with HLB in citrus: Candidatus Liberibacter asiaticus (CaLas), found in all HLB-affected countries except Africa, Candidatus Liberibacter africanus, presently restricted to Africa, and Candidatus Liberibacter americanus, currently limited to Brazil and China. Transmission of the pathogens occurs through the insect vectors Diaphorina citri Kuwayama, the Asian citrus psyllid, or Trioza erytrea Del Guercio, the African citrus psyllid, by dodder (Cuscuta sp.) and through grafting with diseased budwood.

[0002] Typical leaf symptoms observed in HLB-affected citrus plants are an asymmetric blotchy mottling of older leaves and a range of chlorotic patterns, often resembling zinc-deficiency symptoms. These are then followed by twig-dieback, reduced fruit production, premature fruit drop, reduced vigor and tree decline at advanced stages of the disease. Blockage of the translocation stream due to the plugging of sieve elements along with phloem necrosis appears to be a major factor of the disease process.

[0003] HLB affects all known citrus species and citrus relatives with little known resistance. Current management strategies are the removal of infected trees, attempts at elimination of the insect vector through use of insecticides, and nutritional applications. No known cure exists at present. Authorities worldwide have agreed that HLB is devastating the global citrus industry.

[0004] The multi-billion dollar annual citrus industry in Florida, California and outside of the US is severely threatened by the psyllid-CaLas vector-disease pathosystem. Presently, there is no cure for this disease and trees are routinely destroyed once severely infected. Moreover, no known relevant citrus cultivars are resistant to citrus greening disease.

[0005] Infection of plants with pathogens usually results in a series of defense responses such as the hypersensitive reaction, the production of reactive oxygen species, cell wall fortifications, the synthesis of pathogenesis-related proteins, and the production of phytoalexins.

[0006] Microarray technology has revealed much about the host transcriptional regulation in Candidatus Liberibacter spp infection and disease, despite the variability noted between citrus species and even cultivars, different plant tissues and different stages of the infection and disease. However, some reports indicate that the transcriptional response of citrus to Candidatus Liberibacter spp involves upregulation of plant defense-related response genes (plant defense proteins, constitutive disease resistance protein 1, defense-gene transcription regulators, etc), upregulation of sugar metabolism and starch synthesis genes and either upregulation or downregulation (depending on the study) of light reactions genes (Albrecht and Bowman, Plant Sci 2012, 185-186:118-130; Katagiri et al, Molec Plant-Microbe Interactions 2010, 23:1531-36; Anderson et al, Funct Plant Biol, 2010; 37:499-512; Bolton, Molec Plant-Microbe Interaction 2009; 22:487-97; Kim et al., Phytopathology 2009; 99:50-57; Martinelli et al, PLoS One 2012 7:e38039; Conrath, Plant Signaling and Behav 2006, 1:179-84; Jones and Dangl, Nature 2006; 444:323-329; Mafra et al, BMC Genomics 2013; 14:247). However, no cause-and-effect relationship between the disease and expression of individual genes or gene families has been elucidated to date.

[0007] Some proposed strategies for prevention and treatment of HLB include prevention of Candidatus Liberibacter spp infection, induction of tolerance to Candidatus Liberibacter, prevention of transmission of Candidatus Liberibacter by the psyllid vectors and enhancement of plant defense mechanisms.

[0008] US Patent Publication 2013025995 to Masaoka et al., 20130225456 to Figueredo, et al and U.S. Pat. No. 8,546,360 to Musson, IV, disclose chemical compositions for use as biocides for controlling bacterial infection in citrus trees, such as HLB.

[0009] Some suggested methods target the psyllid vector. US Patent Publication 20130266535 to Stelinski et al discloses the release of methyl salicylate attractants to lure psyllid HLB vectors away from the citrus crops. US Patent Publication 20130287727 to Woods et al also discloses the use of psyllid attractants for luring away, capturing and/or eliminating the psyllid vectors. U.S. Pat. No. 8,372,443 to Rouseff et al discloses the use of volatile compounds (for example, dimethyl sulfide) for repelling or killing the psyllid vectors transmitting HLB. US Patent Publication 20110119788 to Rodriguez Baixauli et al discloses the transgenic expression and release, in the citrus trees, of volatiles for repellency or resistance of the psyllid vectors and HLB bacteria.

[0010] Induction of the tree's defense response mechanism has been proposed. US Patent Publication 20140030228 to Blotsky et al discloses methods for biological control of plant pathogens, such as Candidatus Liberibacter, by application of bacteria to the trees (“priming”). US Patent Publications 20100092442, 20110318386, 20120003197 and U.S. Pat. Nos. 8,524,222, 8,246,965 and 8,025,875, all to Jacobsen et al. disclose the use of non-pathogenic bacterial isolates for induction of systemic acquired resistance (SAR) pathogenic infection, including salicylic acid accumulation, induction of defense proteins and release of ROS.

[0011] Some proposed methods employ transgenic and recombinant technology for increasing resistance or tolerance to the pathogen. US Patent Publication 20130205443 to Mirkov et al. discloses methods for enhancing pathogen resistance in citrus trees by administering to or transgenically expressing in the trees one or more anti-microbial peptides, such as plant defensins, chitinases, and the like.

[0012] US Patent Publication 20100122376 to Zipfel et al., discloses methods for enhancing citrus tree's resistance to plant bacterial pathogens by transgenically expressing, in the tree, an EF-Tu receptor protein, and intensifying the host tree's response (PAMP-triggered immunity and effector-triggered immunity) to the pathogen's EF-Tu elongation factor.

[0013] US Patent Publication 20090036307 to Gabriel et al., discloses methods for interfering with a bacterial infection of citrus trees by application, or expression of the potentially protective bacteriophage Bacterial Outer Membrane Breaching protein (BOMBp).

[0014] US Patent Publication 20130318652 to Messier discloses the transgenic expression of a plant defense protein, the dirigent protein, for conferring enhanced resistance to HLB infection and disease symptoms. US Patent publication 20080163390 to Kachroo et al. discloses inhibition of fatty acid desaturases for enhancing plant pathogen resistance response, through enhanced signaling intermediates.

[0015] However, to date, overexpression of plant pathogen resistance (PR) proteins in plants has not resulted in enhanced resistance (Conrath et al, 2006), and the complexity of HLB infection and disease has confounded efforts to boost citrus tree's resistance to the HLB epidemic through direct application or genetic modification.

### SUMMARY OF THE INVENTION

[0016] According to an aspect of some embodiments of the present invention there is provided a method of increasing yield, growth rate, vigor, biomass, fruit quality or stress tolerance of a citrus plant when infected with a plant pathogen, the method comprising introducing into the citrus plant an isolated nucleic acid agent comprising a nucleic acid sequence which specifically reduces the expression of at least one plant pathogen resistance gene product of the plant, thereby modulating at least one plant pathogen resistance response and increasing yield, growth rate, vigor, biomass, fruit quality or stress tolerance of the citrus plant when infected with a plant pathogen.

[0017] According to an aspect of some embodiments of the present invention there is provided a method of increasing yield, growth rate, vigor, biomass, fruit quality or stress tolerance of a plant when infected with a Candidatus Liberibacter spp, the method comprising introducing into the plant an isolated nucleic acid agent comprising a nucleic acid sequence which specifically reduces the expression of at least one plant pathogen resistance gene product of the plant, thereby modulating at least one plant pathogen resistance response and increasing yield, growth rate, vigor, biomass, fruit quality or stress tolerance of the plant when infected with a Candidatus Liberibacter Spp.

[0018] According to some embodiments of the present invention the plant pathogen is a Candidatus Liberibacter spp.

[0019] According to some embodiments of the present invention the plant is a citrus plant or a Solanaceous plant.

[0020] According to some embodiments of the present invention the plant is a citrus plant.

[0021] According to some embodiments of the present invention the method further comprises monitoring symptoms of infection in the infected plant following introducing.

[0022] According to some embodiments of the present invention the Candidatus Liberibacter spp is selected from the group consisting of Candidatus Liberibacter asiaticus, Candidatus Liberibacter africanus, Candidatus Liberibacter americanus and Candidatus Liberibacter psyllaurous.

[0023] According to some embodiments of the present invention the pathogen is Candidatus Liberibacter asiaticus (CaLas).

[0024] According to some embodiments of the present invention the plant, when infected, is suffering from HuangLongBing disease (HLB or citrus greening).

[0025] According to some embodiments of the present invention the plant pathogen resistance response is selected from the group consisting of changes in Salicylic acid levels, changes in Jasmonic acid levels, changes in Gibberellic acid levels, changes in Auxin levels, changes in Cytokinin levels, changes in Ethylene levels, changes in ABA phyto-hormones levels, up-regulation of phyto-hormone-related genes, biosynthesis, deposition and degradation of callose, reactive oxygen species production, functional FLS2/BAK1 complex formation, protein-kinase pathway activation, phloem blockage, starch accumulation, starch accumulation in phloem parenchyma cells, polymer sieve formation, changes in carbohydrate metabolism, cambial activity aberrations, sucrose accumulation and carotenoid synthesis.

[0026] According to some embodiments of the present invention the increase in yield, growth rate, vigor, biomass, fruit quality or stress tolerance is a change in a parameter selected from the group consisting of increased water uptake, increased plant height, increased plant flower number, decreased starch accumulation and decreased Disease Sign Index.

[0027] According to some embodiments of the present invention the change in said parameter is measured at a time point selected from the group consisting of 2-3 weeks post infection, 3-4 weeks post infection, 5-7 weeks post infection, 1-2 months post infection, 2-4 months post infection, 4-6 months post infection, 5-8 months post infection and 5-12 months post infection.

[0028] According to some embodiments of the present invention the pathogen resistance response is selected from the group consisting of reactive oxygen species production, callose biosynthesis and deposition, phloem blockage and changes in carbohydrate metabolism.

[0029] According to some embodiments of the present invention the plant pathogen resistance gene product is selected from plant gene products having upregulated expression following infection of the plant with said plant pathogen.

[0030] According to some embodiments of the present invention the plant pathogen resistance gene product is selected from the group consisting of the polynucleotide sequences of Table IV.

[0031] According to some embodiments of the present invention the plant pathogen resistance gene product is selected from the group consisting of plant gene products having at least 60% identity to any of the polynucleotide sequences of Table II.

[0032] According to some embodiments of the present invention the plant pathogen resistance gene product is selected from the group consisting of the polynucleotide sequences of Table V.

[0033] According to some embodiments of the present invention the plant pathogen resistance gene product is selected from SEQ ID NOs: 204-265 and 489-516 or homologs thereof.

[0034] According to some embodiments of the present invention, the plant pathogen resistance gene product is selected from SEQ ID NOs. 1-203 and homologs thereof.

[0035] According to some embodiments of the present invention the plant pathogen resistance gene product is selected from the group consisting of plant gene products having at least 60% identity to any of the polynucleotide sequences of Table III.

[0036] According to some embodiments of the present invention the plant pathogen resistance gene product is selected from the group consisting of an ADP-glucose pyrophosphorylase large subunit (AGPase) gene product, a glucose-6-phosphate/phosphate translocator (GPT) gene product, a Callose synthase gene product and a Myb transcriptional regulator (MYB) gene product.

[0037] According to some embodiments of the present invention, the nucleic acid sequence comprises a nucleic acid sequence selected from the group consisting of SEQ ID NOs. 528, 530, 532 and 536.

[0038] According to some embodiments of the present invention the plant pathogen resistance gene is selected from SEQ ID NOs: 623-714 or homologs thereof.

[0039] According to some embodiments of the present invention the introducing is affected via spraying, dusting, soaking, injecting, aerosol application, particle bombardment, irrigation or via positive or negative pressure application.

[0040] According to some embodiments of the present invention the plant is a fruit tree.

[0041] According to some embodiments of the present invention the fruit tree is a citrus tree.

[0042] According to some embodiments of the present invention the isolated nucleic acid agent further comprises a cell penetrating agent.

[0043] According to some embodiments of the present invention, introducing is following detection of a symptom of infection of the plant with the pathogen.

[0044] According to an aspect of some embodiments of the present invention there is provided an isolated nucleic acid agent comprising a nucleic acid sequence which specifically reduces the expression of at least one plant pathogen resistance gene product selected from the group consisting of plant gene products having at least 60% identity to any of the polynucleotide sequences of Table II.

[0045] According to some embodiments of the present invention the isolated nucleic acid agent is a dsRNA.

[0046] According to some embodiments of the present invention the dsRNA is selected from the group consisting of siRNA, shRNA and miRNA.

[0047] According to some embodiments of the present invention the nucleic acid sequence is greater than 15 base pairs in length.

[0048] According to some embodiments of the present invention the nucleic acid sequence is 19 to 25 base pairs in length.

[0049] According to some embodiments of the present invention the nucleic acid sequence is 30-100 base pairs in length.

[0050] According to some embodiments of the present invention the nucleic acid sequence is 100-500 base pairs in length.

[0051] According to some embodiments of the present invention the plant pathogen resistance gene product is selected from plant gene products having upregulated expression following infection of the plant with said plant pathogen.

[0052] According to some embodiments of the present invention the plant pathogen resistance gene is a HuangLongBing-associated plant pathogen resistance gene.

[0053] According to some embodiments of the present invention the isolated nucleic acid agent comprises a nucleic acid sequence selected from the group consisting of the polynucleotide sequences of Table IV and IV(a).

[0054] According to some embodiments of the present invention there is provided a nucleic acid construct comprising a nucleic acid sequence encoding the isolated nucleic acid agent of the invention.

[0055] According to some embodiments of the present invention the nucleic acid construct further comprises a regulatory element active in plant cells.

[0056] According to some embodiments of the present invention the nucleic acid construct comprises a viral silencing vector comprising a viral genome or portion thereof.

[0057] According to some embodiments of the present invention the nucleic acid construct the viral genome or portion thereof is sufficient to effect viral induced gene silencing.

[0058] According to some aspects of some embodiments of the present invention there is provided a bacterial host cell comprising the nucleic acid construct of the invention.

[0059] According to some embodiments of the present invention the bacterial cell is an Agrobacterium.

[0060] According to an aspect of some embodiments of the present invention there is provided a citrus plant comprising at least one exogenous isolated nucleic acid agent comprising a nucleic acid sequence which specifically reduces the expression of at least one plant pathogen resistance gene product.

[0061] According to an aspect of some embodiments of the present invention there is provided a plant comprising at least one exogenous isolated nucleic acid agent comprising a nucleic acid sequence which specifically reduces the expression of at least one plant pathogen resistance gene product selected from the group consisting of plant gene products having at least 60% identity to any of the polynucleotide sequences of Table II.

[0062] According to some embodiments of the present invention the plant is selected from the group consisting of a tree, a shrub, a bush, a seedling, a scion, a rootstock, an inarched plant, a bud, a budwood, a root and a graft.

[0063] According to some embodiments of the present invention the plant is a citrus or citrus-related plant.

[0064] According to some embodiments of the present invention the plant is a plant at risk of infection with CaLas.

[0065] According to some embodiments of the present invention there is provided a cell of the plant of the invention.

[0066] According to an aspect of some embodiments of the present invention there is provided an agrochemical composition comprising an isolated nucleic acid agent comprising a nucleic acid sequence which specifically reduces the expression of at least one plant pathogen resistance gene product in a plant and a plant-beneficial compound selected from the group consisting of a fertilizer, an antibiotic, a biocide, a pesticide, a pest repellent, an herbicide, a plant hormone.

[0067] According to some embodiments of the present invention the agrochemical composition comprises the isolated nucleic acid agent of the invention or the nucleic acid construct of the invention.

[0068] According to some embodiments of the present invention the agrochemical composition, isolated nucleic acid agent or the nucleic acid construct of the invention is formulated in a formulation selected from the group consisting of an aerosol, a dust, a dry flowable, an emulsifiable flowable, a granule, a microencapsulation, a pellet, a soluble powder, a wettable powder, a liquid and a water dispersible granule.

### BRIEF DESCRIPTION OF THE SEVERAL VIEWS OF THE DRAWINGS

[0069] Some embodiments of the invention are herein described, by way of example only, with reference to the accompanying drawings. With specific reference now to the drawings in detail, it is stressed that the particulars shown are by way of example and for purposes of illustrative discussion of embodiments of the invention. In this regard, the description taken with the drawings makes apparent to those skilled in the art how embodiments of the invention may be practiced.

[0070] In the drawings:

[0071] FIG. 1 shows the effect of PDS (phytoene desaturase) gene silencing using Agrobacterium transformation of TRV VIGS on general phenotype of three tomato cultivars, at 19 and 24 days post infection (dpi). EV—empty vector. Note the progressive photo-bleaching of the leaves in the selected cultivars;

[0072] FIG. 2 is a graph showing detection of PDS gene expression in tomato leaves, indicating the correlation between the silencing of PDS and the leaf color phenotype (green v white). TRV EV is empty vector control;

[0073] FIG. 3 is an illustration depicting the etiology, along an 80 day time course, of disease in tomatoes infected with C. Liberibacter solanacearum (Lso);

[0074] FIG. 4 is a photograph showing the difference in height between infected Tiny Tom tomato plants (right) and uninfected controls (left);

[0075] FIG. 5 is a photograph showing the difference in flower number between infected Tiny Tom tomato plants (right) and uninfected controls (left);

[0076] FIG. 6 is a photograph of an agarose gel showing the results of PCR detection of Lso 16S DNA, corresponding to the expected size in psyllid-rearing infected (19, 20, 23 and 24) but not non-infected (N1, N2) plants;

[0077] FIG. 7 is a photograph of an agarose gel showing the results of PCR detection of Lso 16S, using cDNA, corresponding to the disease phenotype (intense bands correspond to severity of the disease symptoms in plants);

[0078] FIG. 8 is a photograph of an agarose gel verifying the identity and integrity of the inserts of the Agrobacterium clones harboring sequences for gene silencing of selected targets, as well as the empty pTRV1 and control (MCS-multiple cloning site-TRV2 w/o additional sequences) clones;

[0079] FIG. 9 is a graph showing the Ct (cycle threshold) and silencing ratio for the different target genes, indicating that the silencing ratio (fold decrease of transcript relative to EV control) is inversely proportional to basal expression level (as expressed in Ct);

[0080] FIG. 10 is table showing the small RNA abundance and distribution in plants which were exposed to silencing via VIGS;

[0081] FIG. 11 are photographs depicting the phenotypic parameters which make up the Disease Severity Index: DSI 0—normal, healthy plant; 1—slight stunting, suggestion of curling; 2—some stunting, clear curling, stiffness and springiness of leaves; 3—notable stunting, curled and thickened leaves, midrib stiffness and springiness, some purpling; and 4—severe stunting, extremely stiff and thickened, purplish and dying leaves, complete lack of growth and fruit;

[0082] FIG. 12 depicts the grafting procedure for infecting citrus trees/plants with HLB (C. Liberibacter spp);

[0083] FIG. 13 is a photograph of an agarose gel of PCR products verifying the presence of C. Liberibacter 16S DNA (see “+” positive control) in HLB-infected trees (lanes 73, 101, 105, 112 and 171);

[0084] FIG. 14 is a graph showing the up-regulation of expression of the PP2 gene in citrus, in response to HLB infection (normalized expression is calculated using delta Ct against the citrus 18S gene normalizing transcript);

[0085] FIG. 15 is a graph showing the up-regulation of expression of the AGPase gene in citrus, in response to HLB infection (normalized expression is calculated using delta Ct against the citrus 18S gene normalizing transcript);

[0086] FIG. 16 is a graph showing the up-regulation of expression of the GPT gene in citrus, in response to HLB infection (normalized expression is calculated using delta Ct against the citrus 18S gene normalizing transcript);

[0087] FIG. 17 is a graph showing the up-regulation of expression of the alpha-amylase gene in citrus, in response to HLB infection (normalized expression is calculated using delta Ct against the citrus 18S gene normalizing transcript);

[0088] FIG. 18 is a graph showing the up-regulation of expression of the oxidoreductase gene in citrus, in response to HLB infection (normalized expression is calculated using delta Ct against the citrus 18S gene normalizing transcript);

[0089] FIG. 19 is a graph showing the up-regulation of expression of the CSD1 gene in citrus, in response to HLB infection (normalized expression is calculated using delta Ct against the citrus 18S gene normalizing transcript);

[0090] FIG. 20 is a graph showing the upregulation of MYB gene expression in HLB infected citrus trees (red columns, HLB positive), as assayed by signal amplification, at one, three and 6 months post-grafting (infection);

[0091] FIG. 21 is a graph showing the upregulation of zinc transporter 5 gene expression in HLB infected citrus trees (red columns, HLB positive), as assayed by signal amplification, at one, four and 6 months post-grafting (infection);

[0092] FIG. 22 is a graph showing the upregulation of PP2 gene expression in HLB infected citrus trees (red columns, HLB positive), as assayed by signal amplification, at one, four and 6 months post-grafting (infection);

[0093] FIG. 23 is a graph showing the upregulation of superoxide dismutase gene expression in HLB infected citrus trees (red columns, HLB positive), as assayed by signal amplification, at one, four and 6 months post-grafting (infection);

[0094] FIG. 24 is a graph showing the upregulation of AGPase gene expression in HLB infected citrus trees (red columns, HLB positive), as assayed by signal amplification, at one, three and 6 months post-grafting (infection);

[0095] FIG. 25 is a graph illustrating the increased starch accumulation in leaves of HLB infected citrus trees (red columns, HLB positive) at 6 months post-grafting (infection);

[0096] FIG. 26 is a graph illustrating the altered dynamics of starch accumulation in leaves of HLB infected citrus trees (red columns, HLB positive), measured at 08:00, 14:00 and 20:00, standardized to the starch content of healthy leaves at 8:00;

[0097] FIG. 27 shows statistical analysis of the linear best fit of the results of starch accumulation dynamics shown in FIG. 26;

[0098] FIG. 28 is a graph showing the effects of GPT silencing by VIGS agro-infusion on GPT expression in tomato plants, measured as relative expression two weeks post-Lso infection (red columns are infected plants);

[0099] FIG. 29 is a graph showing the effects of lipoxygenase D (LoxD) silencing by VIGS agro-infusion on LoxD expression in tomato plants, measured as relative expression two weeks post-Lso infection (red columns are infected plants);

[0100] FIG. 30 is a graph showing the effects of Myb transcriptional regulator (MYB) silencing by VIGS agro-infusion on MYB expression in tomato plants, measured as relative expression two weeks post-Lso infection (red columns are infected plants);

[0101] FIG. 31 is a graph showing the effects of AGPase silencing by VIGS agro-infusion on AGPase expression in tomato plants, measured as relative expression two weeks post-Lso infection (red columns are infected plants);

[0102] FIG. 32 is a series of graphs showing the effects of gene silencing (by VIGS agro-infusion) of candidate genes Myb, LoxD, CalS, PP2, AGPase and GPT on the phenotype (DSI) of infected tomato plants 2 and 3 weeks post-Lso infection (red columns are infected plants), compared to empty vector (EV) and untreated control plants;

[0103] FIG. 33 is a series of graphs showing the effects of gene silencing (by VIGS agro-infusion) of candidate genes Myb, CalS, PP2, AGPase and GPT on the phenotype (flower number) of infected tomato plants 2 and 3 weeks post-Lso infection (red columns are infected plants), compared to empty vector (EV) and untreated control plants;

[0104] FIG. 34 is a graph showing the effects of gene silencing (by VIGS agro-infusion) of candidate genes Myb, CalS, PP2, AGPase and GPT on the phenotype (water uptake) of infected tomato plants 5 weeks post-Lso infection (red columns are infected plants), compared to empty vector (EV) and untreated control plants.

### DESCRIPTION OF SPECIFIC EMBODIMENTS OF THE INVENTION

[0105] The present invention, in some embodiments thereof, relates to methods for enhancing fitness of pathogen-infected plants, and, more particularly, but not exclusively, to methods of using RNA interference for modulation of plant-pathogen resistance response gene expression. The present invention discloses compositions for silencing of specific plant pathogen resistance response genes with siRNA in pathogen-susceptible plants, reducing the negative impact of the plant pathogen resistance response upon infection of the host plant and enhancing fitness. In particular, the present invention provides compositions and methods for enhancing host plant fitness and fruit yield and quality following Candidatus Liberibacter spp infection and, specifically, Candidatus Liberibacter spp infection in citrus plants and trees, as in Huang Long Bing.

[0106] Before explaining at least one embodiment of the disclosure in detail, it is to be understood that the disclosure is not necessarily limited in its application to the details set forth in the following description or exemplified by the Examples. The disclosure is capable of other embodiments or of being practiced or carried out in various ways. Also, it is to be understood that the phraseology and terminology employed herein is for the purpose of description and should not be regarded as limiting.

[0107] It is understood that any Sequence Identification Number (SEQ ID NO) disclosed in the instant application can refer to either a DNA sequence or a RNA sequence, depending on the context where that SEQ ID NO is mentioned, even if that SEQ ID NO is expressed only in a DNA sequence format or a RNA sequence format. For example, SEQ ID NO: 527 is expressed in a DNA sequence format (e.g., reciting T for thymine), but it can refer to either a DNA sequence that corresponds to an alpha-amylase nucleic acid sequence, or the RNA sequence of an RNA molecule (e.g. reciting U for uridine) that corresponds to the RNA sequence shown. In any event, both DNA and RNA molecules having the sequences disclosed with any substitutes are envisioned.

[0108] Plant immune response provides protection against a variety of phytopathogenic organisms, including bacteria, fungi, nematodes, viruses, mollicutes (mycoplasmas, spiroplasmas), protozoa, phanerogams; rickettsias, and viroids, insects and parasitic plants. The two-tiered system of plant innate immune response to pathogen insult or invasion [microbial/pathogen-associated molecular pattern- (PAMP or MAMP) triggered immunity, or PTI, and effector-triggered immunity, or ETI) can be divided into characteristic stages: In stage 1, plants detect MAMPs and/or PAMPs via transmembrane pattern recognition receptors (PRRs, such as Receptor-Like Kinases, RLKs), triggering PTI. The plant's initial response to the pathogen insult is mediated by numerous, somewhat overlapping signaling cascades (salicylic acid signaling is critical) and includes molecular, morphological and physiological changes. Early changes occurring within seconds to minutes include ion-flux across the plasma membrane, phytoalexin synthesis, an oxidative burst, mitogen activated protein (MAP) kinase activation and protein phosphorylation, followed by substantial transcriptional reprogramming within the first hour of PTI. Later changes include pathogenesis-related protein synthesis, callose deposition, which serves as a physical barrier at infection sites, and stomatal closure.

[0109] In stage 2, virulent pathogens respond to the PRR-based defenses by deploying effectors into the host cell to evade or suppress PTI responses. These in turn activate stage 3, in which ETI, mediated by intracellular nucleotide-binding domain Leucine-Rich Repeat (LRR) proteins, leads to growth inhibition and often accompanying hypersensitive response.

[0110] The hypersensitive response involves a form of programmed cell death at the site of the pathogen invasion. The hypersensitive response is characterized by cytoplasmic shrinkage, chromatin condensation, mitochondrial swelling, vacuolization and chloroplast disruption. Molecular events underlying the hypersensitive response include down-regulation of photosynthesis, increased production and accumulation of reactive oxygen species, reactive nitrogen oxide intermediates and the defense hormones salicylic and jasmonic acid, activation of MAPK cascades changes in intracellular calcium levels and transcriptional reprogramming, however, with greater amplitude and acceleration than in the PTI stage.

[0111] Pathogen infection also produces a type of systemic response in the plant, remote from the site of infection, “priming” other plant organs and tissues for pathogen insult. The systemic acquired response (SAR) prepares the unaffected tissues for contact with the pathogens by mobilizing pathogenesis related proteins, signaling and synthetic pathways, allowing for swift and heightened response in the event of pathogen insult in unaffected tissues, while economically avoiding the initiation of a full-blown response until actually challenged. The systemic signals mediating SAR have not been fully elucidated, but salicylic acid has been confirmed as an important signaling intermediate.

[0112] The result of the PTI, ETI, hypersensitive response and SAR, in response to a pathogen insult, is often significant re-allocation of energy resources and growth inhibition, isolation of the affected region and, ultimately cell death and necrosis of affected regions. P-protein accumulation and callose formation act to occlude sieve elements in the vascular system of pathogen-infected tissue, blocking pathogen and pathogen effector dispersal, resulting in bidirectional disruption of water, metabolite and hormone transport.

[0113] Thus, while the plant pathogen responses act to effectively isolate the affected tissues and limit pathogen reproduction, plant pathogen defenses involve significant energy expenditure, metabolic and morphological re-organization, ultimately detrimental to plant vigor, fitness, growth and crop (i.e. fruit, seed, etc) production. Of particular importance is the common re-infection by plant pathogens, for example by repeated contact with pathogen-bearing insect vectors effective in disseminating the pathogenic organisms, and the recurrent activation of the plant pathogen response, depletion of plant resources and subsequent loss of host plant vigor.

[0114] RNA interference (dsRNA and siRNA) strategies have been shown to be effective in silencing gene expression in a broad variety of species, including plants.

[0115] RNA interference (RNAi) inhibits gene expression in a sequence specific fashion, occurring in at least two steps: The first step cleaves a longer dsRNA into shorter, 21- to 25-nucleotide-long dsRNAs, termed “small interfering RNAs” or siRNAs. In the second step, the smaller siRNAs then mediate the degradation of a target corresponding mRNA molecule. This RNAi effect can be achieved by introduction of either longer double-stranded RNA (dsRNA) or shorter small interfering RNA (siRNA) to the target sequence within cells.

[0116] RNAi has been successfully demonstrated in plant-pest management. Plants possess an innate RNA interference capability, similar but not identical to animal RNAi, highly effective in preventing spread of viral pathogens. Also, as most insects are susceptible to RNAi gene silencing by dsRNA, expression of pest-specific dsRNA in transgenic plants, as well as direct application of dsRNA to the insect pests can afford protection from plant-pest injury and damage. The introduction of dsRNA into transgenic plants can be highly specific to target pathogens. Indeed, gene silencing by dsRNA has been demonstrated effective for plant-pest control and plant-virus control, for example, US Patent Publication No. 20110150839 to Arciello et al discloses the transgenic expression, in a plant host, of a construct encoding a pathogen GPCR receptor-specific dsRNA for enhancing the resistance of the plant to attack by phytopathogenic organisms.

[0117] Resistance to Potato-Y virus, Cucumber and Tobacco Mosaic Virus, Tomato Spotted Wilt Virus, Bean Golden Mosaic Virus, Banana Bract Mosaic Virus, and Rice Tungro Bacilliform Virus among many others has been demonstrated in transgenic plants expressing viral-specific RNA transcripts. Transgenic expression of fungal-specific dsRNA effectively conferred resistance to barley powdery mildew Blumeria graminis in barley.

[0118] It has been found that direct application of dsRNA is also effective in plants—for example, viral-specific double-stranded RNA (dsRNA) from the tobamovirus, potyvirus, and alfamovirus groups, when directly delivered to leaf cells, effectively inhibited infection of the plants. Methods for introduction of dsRNA into seeds, shoots, plant cell culture and all tissues and organs of adult plants are well known in the art.

[0119] The present inventors propose to reduce the deleterious effects of the plant pathogen resistance response on plant fitness, growth, yield and fruit quality by modulating plant-pathogen resistance response gene expression using RNAi gene silencing of endogenous pathogen resistance response genes, in citrus or other Candidatus Liberibacter spp-susceptible host plants. The present inventors have identified target pathogen-resistance response-associated genes and designed nucleic acid agents for RNAi silencing which, when provided to the plant, improve the fitness, vigor, yield, fruit quality and other traits of the plant following pathogen infection.

[0120] Thus, according to some embodiments of aspects of the invention there is provided a method of increasing yield, growth rate, vigor, biomass, stress tolerance or fruit quality of a citrus plant when infected with a plant pathogen, the method comprising introducing into the citrus plant an isolated nucleic acid agent comprising a nucleic acid sequence which specifically reduces the expression of at least one plant pathogen resistance gene product of a plant, thereby modulating at least one plant pathogen resistance response and increasing yield, growth rate, vigor, biomass, fruit quality or stress tolerance of the citrus plant when infected with the plant pathogen.

[0121] In yet another embodiment of the present invention, there is provided a method of increasing yield, growth rate, vigor, biomass, stress tolerance or fruit quality of a plant when infected with a Candidatus Liberibacter spp bacteria, the method comprising introducing into the plant an isolated nucleic acid agent comprising a nucleic acid sequence which specifically reduces the expression of at least one plant pathogen resistance gene product of the plant, thereby modulating at least one plant pathogen resistance response and increasing yield, growth rate, vigor, biomass, fruit quality or stress tolerance of the plant when infected with the Candidatus Liberibacter spp bacteria.

[0122] The term “plant” as used herein encompasses whole plants, ancestors and progeny of the plants and plant parts, including seeds, shoots, stems, roots (including tubers), and isolated plant cells, tissues and organs. The plant may be in any form including suspension cultures, embryos, meristematic regions, callus tissue, leaves, gametophytes, sporophytes, pollen, and microspores. It will be appreciated, that the plant or seed thereof may be transgenic plants.

[0123] As used herein the phrase “plant cell” refers to plant cells which are derived and isolated from disintegrated plant cell tissue or plant cell cultures. The phrase “plant cell” may also refer to plant cells “in situ”, e.g. cells of plant tissue, which are not isolated from the tissue or plant organ.

[0124] As used herein the phrase “plant cell culture” refers to any type of native (naturally occurring) plant cells, plant cell lines and genetically modified plant cells, which are not assembled to form a complete plant, such that at least one biological structure of a plant is not present. Optionally, the plant cell culture of this embodiment of the present disclosure may comprise a particular type of a plant cell or a plurality of different types of plant cells. It should be noted that optionally plant cultures featuring a particular type of plant cell may be originally derived from a plurality of different types of such plant cells. In certain embodiments according to the present disclosure, the plant cell is a non-sexually producing plant cell. In other aspects, a plant cell of the present disclosure is a non-photosynthetic plant cell.

[0125] Any commercially or scientifically valuable plant susceptible to infection by Candidatus Liberibacter spp. is envisaged in accordance with some embodiments of the invention. Plants that are particularly useful in the methods of the disclosure include, but are not limited to:

[0126] Plants from the Rutaceae family such as all citrus species and subspecies, including sweet oranges commercial varieties (Citrus sinensis Osbeck (L.), clementines (C. reticulata), limes (C. aurantifolia), lemon (C. limon), sour orange (C. aurantium), hybrids and relatives (Citranges, Citrumelos, Citrandarins), Balsamocitrus dawei, C. maxima, C. jambhiri, Clausena indica, C. lansium, Triphasia trifolia, Swinglea glutinosa, Micromellum tephrocarpa, Merope spp., Eremolemon; Atalantia spp., Severinia buxifolia; Microcitrus spp., Fortunella spp., Calodendrum capense, Murraya spp., Poncirus trifoliate;

[0127] Plants of the Solanaceae family such as Tobacco (Nicotiana spp.), Tomato (Lycopersicon esculentum), Potato (Solanum tuberosum), Capsicum (Capsicum annuum), Cape gooseberry (Physalis peruviana), Tomato tree or Tamarillo (Solanum betaceum);

[0128] Plants from Rosaceae family such as Pear (Pyrus communis);

[0129] Plants from Apiaceae family such as Carrot (Daucus carota);

[0130] Plants from Convolvulaceae family such as Dodder (Cuscuta spp.)

[0131] Plants from Apocynaceae family such as: Vinca (Catharanthus roseus).

[0132] According to some embodiments, the plant used by the method of the invention is a crop plant.

[0133] According to a specific embodiment, the plant is selected from the group consisting of citrus plants, including, but not limited to all citrus species and subspecies, including sweet oranges commercial varieties (Citrus sinensis Osbeck (L.), clementines (C. reticulata), limes (C. aurantifolia), lemon (C. limon), sour orange (C. aurantium), hybrids and relatives (Citranges, Citrumelos, Citrandarins), Balsamocitrus dawei, C. maxima, C. jambhiri, Clausena indica, C. lansium, Triphasia trifolia, Swinglea glutinosa, Micromellum tephrocarpa, Merope spp., Eremolemon; Atalantia spp., Severinia buxifolia; Microcitrus spp., Fortunella spp., Calodendrum capense, Murraya spp. and Poncirus trifoliate. In some embodiments the citrus plant is an orange, a lemon, a lime, a grapefruit, a clementine, a tangerine or a pornello tree. The citrus tree can be a seed-grown tree or a grafted tree, grafted onto a different citrus rootstock.

[0134] As used herein, the phrase “plant pathogen” or “phytopathogen” refers to a nucleic acid-containing agent capable of proliferation within the plant cell or plant, the pathogen causing disease in the plant, by disrupting normal function and/or growth of the plant, usually by invasion of the plant cell, and exploiting the plant cell nutrients, metabolites and/or energy metabolism for pathogen reproduction. Plant pathogenic organisms include pathogenic viruses, bacteria, fungi, oomycetes, Ascomycetes, Basidomycetes, nematodes, mollicutes (mycoplasmas, spiroplasmas), protozoa, phanerogams, rickettsias, and viroids, insects and parasitic plants.

[0135] A plant pathogen can be an intracellular or extra-cellular pathogen. Table I below includes a non-exhaustive list of exemplary plant pathogens which cause or facilitate the indicated disease in the indicated host plant, the response to which is amenable to modulation by the compositions and methods of the present invention.

TABLE I

| Host plant | Disease | Bacterial pathogen |
|---|---|---|
| Tomato | Bacterial canker | Clavibacter michiganensis subsp. michiganensis |
| Tomato | Bacterial speck | Pseudomonas syringae pv. tomato |
| Tomato | Bacterial spot | Xanthomonas campestris pv. vesicatoria |
| Tomato | Bacterial stem rot and fruit rot | Erwinia carotovora subsp. carotovora |
| Tomato | Bacterial wilt | Ralstonia solanacearum |
| Tomato | Pith necrosis | Pseudomonas corrugata |
| Tomato | Syringae leaf spot | Pseudomonas syringae pv. syringae |
| Tomato | Psyllid yellowing | Candidatus Liberibacter psyllaurous |
| Tomato | Zebra chip | Candidatus Liberibacter solanacearum (Lso) |
| Citrus | Bacterial spot | Xanthomonas campestris pv. citrumelo |
| Citrus | Black pit (fruit) | Pseudomonas syringae |
| Citrus | Blast | Pseudomonas syringae |
| Citrus | Citrus canker | Xanthomonas axonopodis = |
| | | Xanthomonas campestris pv. citri |
| Citrus | Citrus stubborn | Spiroplasma citri |
| Citrus | Citrus variegated chlorosis | Xylella fastidiosa |
| Citrus | Huanglongbing = citrus | Candidatus Liberibacter asiaticus; |
| | greening | Candidatus Liberibacter africanus; |
| | | Candidatus Liberibacter americanus |

[0136] According to one embodiment of the invention, the pathogen is a bacteria, causing or facilitating Huanglongbing disease, such as Candidatus Liberibacter asiaticus, Candidatus Liberibacter africanus, Candidatus Liberibacter americanus and the like. According to another embodiment of the invention, the pathogen is a bacteria, causing or facilitating a disease in tomato such as zebra chip disease (Candidatus Liberibacter solanacearum (Lso)), psyllid yellowing (Candidatus Liberibacter psyllaurous) and the like.

[0137] As used herein, the terms “plant disease” or “pathogen infection” is defined as undesirable changes in the physiology, morphology, reproductive fitness, economic value, vigor, biomass, fruit quality, stress-tolerance, resistance to infection and/or infestation of a plant, directly or indirectly resulting from contact with a plant pathogenic agent. According to one embodiment of the invention, the undesirable changes include, but are not limited to biomass and/or yield of the diseased or pathogen infected plant. According to another embodiment of the invention, change in yield includes, but is not limited to change in fruit yield, fruit quality, seed yield, flower yield, crop yield and the like. In some embodiments, the host plant is a citrus tree or bush and the plant disease or pathogenic infection is a Candidatus Liberibacter infection, in particular, a Candidatus Liberibacter asiaticus infection. In some embodiments, the Candidatus Liberibacter infection causes HLB disease in the host plant.

[0138] HLB disease, caused by infection of a susceptible host plant (e.g. a citrus plant) with a Candidatus Liberibacter pathogen, such as, but not limited to C. Liberibacter asiaticus, is characterized by asymmetric blotchy mottling of older leaves, chlorotic patterns, twig-dieback, reduced fruit production, premature fruit drop and eventually tree decline, most likely due to blockage of the translocation stream by plugging of sieve elements along with phloem necrosis. Thus, in some embodiments of some aspects of the invention, introducing the isolated nucleic acid agent of the invention into the susceptible plant (e.g. citrus tree) results in reduced mottling and fewer chlorotic patterns in the leaves, reduced twig die-back, improved fruit production, prevention of premature fruit drop, increased vigor and delay or prevention of decline in treated plants and trees following Candidatus Liberibacter infection, as compared to identical untreated plants and trees, following infection by Candidatus Liberibacter spp.

[0139] According to some embodiments of the invention, reducing expression of at least one plant pathogen resistance response gene product in a plant increases at least one of yield, growth rate, vigor, biomass or stress tolerance of the plant following pathogen infection, compared to a similar or identical plant having normal expression of the at least one plant pathogen resistance response gene product, following pathogen infection.

[0140] As used herein, the phrase “stress tolerance” refers to both tolerance to biotic stress, and tolerance to abiotic stress. The phrase “abiotic stress” as used herein refers to any adverse effect on metabolism, growth, viability and/or reproduction of a plant caused by a-biotic agents. Abiotic stress can be induced by any of suboptimal environmental growth conditions such as, for example, water deficit or drought, flooding, freezing, low or high temperature, strong winds, heavy metal toxicity, anaerobiosis, high or low nutrient levels (e.g. nutrient deficiency), high or low salt levels (e.g. salinity), atmospheric pollution, high or low light intensities (e.g. insufficient light) or UV irradiation. Abiotic stress may be a short term effect (e.g. acute effect, e.g. lasting for about a week) or alternatively may be persistent (e.g. chronic effect, e.g. lasting for example 10 days or more). The present disclosure contemplates situations in which there is a single abiotic stress condition or alternatively situations in which two or more abiotic stresses occur.

[0141] As used herein the phrase “abiotic stress tolerance” refers to the ability of a plant to endure an abiotic stress without exhibiting substantial physiological or physical damage (e.g. alteration in metabolism, growth, viability and/or reproducibility of the plant).

[0142] According to some embodiments, reducing expression of at least one plant pathogen resistance response gene product in a pathogen-infected plant increases crop production. Crop production can be measured by biomass, vigor or yield, and can be used to calculate nitrogen use efficiency and fertilizer use efficiency. As used herein, the phrase “nitrogen use efficiency (NUE)” refers to a measure of crop production per unit of nitrogen fertilizer input. Fertilizer use efficiency (FUE) is a measure of NUE. The plant's nitrogen use efficiency is typically a result of an alteration in at least one of the uptake, spread, absorbance, accumulation, relocation (within the plant) and use of nitrogen absorbed by the plant. Improved crop production, vigor, yield, NUE or FUE is with respect to that of a pathogen-infected or diseased plant not having reduced expression of the at least one plant pathogen resistance gene product (i.e., lacking the nucleic acid agent of the invention) of the same or similar species and developmental stage and grown under the same or similar conditions.

[0143] As used herein the term/phrase “biomass”, “biomass of a plant” or “plant biomass” refers to the amount (e.g., measured in grams of air-dry tissue) of a tissue produced from the plant in a growing season. An increase in plant biomass can be in the whole plant or in parts thereof such as aboveground (e.g. harvestable) parts, vegetative biomass, roots and/or seeds or contents thereof (e.g., oil, starch etc.).

[0144] As used herein the term/phrase “vigor”, “vigor of a plant” or “plant vigor” refers to the amount (e.g., measured by weight) of tissue produced by the plant in a given time. Increased vigor could determine or affect the plant yield or the yield per growing time or growing area. In addition, early vigor (e.g. seed and/or seedling) results in improved field stand.

[0145] As used herein the term/phrase “yield”, “yield of a plant” or “plant yield” refers to the amount (e.g., as determined by weight or size) or quantity (e.g., numbers) of tissues or organs produced per plant or per growing season. Increased yield of a plant can affect the economic benefit one can obtain from the plant in a certain growing area and/or growing time.

[0146] According to one embodiment the yield is measured by cellulose content, oil content, starch content and the like.

[0147] According to another embodiment the yield is measured by oil content.

[0148] According to another embodiment the yield is measured by protein content.

[0149] According to another embodiment, the yield is measured by seed number, seed weight, flower number or flower weight, fruit number or fruit weight per plant or part thereof (e.g., kernel, bean).

[0150] A plant yield can be affected by various parameters including, but not limited to, plant biomass; plant vigor; plant growth rate; seed yield; seed or grain quantity; seed or grain quality; oil yield; content of oil, starch and/or protein in harvested organs (e.g., seeds or vegetative parts of the plant); flower development, number of flowers (e.g. florets) per panicle (e.g. expressed as a ratio of number of filled seeds over number of primary panicles); harvest index; number of plants grown per area; number and size of harvested organs per plant and per area; number of plants per growing area (e.g. density); number of harvested organs in field; total leaf area; carbon assimilation and carbon partitioning (e.g. the distribution/allocation of carbon within the plant); resistance to shade; resistance to lodging, number of harvestable organs (e.g. seeds, flowers), seeds per pod, weight per seed, flowers per plant; and modified architecture [such as increase stalk diameter, thickness or improvement of physical properties (e.g. elasticity)].

[0151] According to some embodiments of aspects of the invention, fruit quality and yield are increased by introduction into the plant of the nucleic acid agent. Fruit yield can be measured according to harvest index (see above), expressed as number and/or size of fruit per plant or per growing area, and/or according to the quality of the fruit-fruit quality can include, but is not limited to sugar content, appearance of the fruit, shelf life and/or suitability for transport of the fruit, ease of storage of the fruit, increase in commercial value, fruit weight, juice weight, juice weight/fruit weight, rind weight, TSS—total soluble solids (°Brix), seed quality, symmetry, dry weight, TA—titrable acidity, MI—maturity index, CI—Colour index, peel colour, nutraceutical properties vitamin C—ascorbic acid—content, hesperidin content, total flavonoids content and the like.

[0152] Improved plant NUE is translated in the field into either harvesting similar quantities of yield, while deploying less fertilizer, or increased yields gained by implementing the same levels of fertilizer. Thus, improved NUE or FUE has a direct effect on plant yield in the field.

[0153] As used herein “biotic stress” refers stress that occurs as a result of damage done to plants by other living organisms, such as bacteria, viruses, fungi, parasites, beneficial and harmful insects, weeds, and cultivated or native plants. It will be appreciated that, in some embodiments, improving or increasing vigor or growth rate of a plant pathogen infected or diseased plant according some aspects of some methods of the invention, while reducing the expression of at least one plant pathogen resistance response gene, contributes to the overall health and robustness of the plant, thereby conferring improved tolerance to biotic, as well as abiotic stress. Such biotic stress can be, for example, the result of infection with same pathogen(s) with which the infected or diseased plant was infected prior to introduction of the isolated nucleic acid agent, or with a different plant pathogen.

[0154] In some embodiments of the invention, introduction of the isolated nucleic acid agent of the invention into the plant, and modulation of the at least one plant pathogen resistance response results in: improved tolerance of abiotic stress (e.g., tolerance of water deficit or drought, heat, cold, non-optimal nutrient or salt levels, non-optimal light levels) or of biotic stress (e.g., crowding, allelopathy, or wounding); a modified primary metabolite (e.g., fatty acid, oil, amino acid, protein, sugar, or carbohydrate) composition; a modified secondary metabolite (e.g., alkaloids, terpenoids, polyketides, non-ribosomal peptides, and secondary metabolites of mixed biosynthetic origin) composition; a modified trace element (e.g., iron, zinc), carotenoid (e.g., beta-carotene, lycopene, lutein, zeaxanthin, or other carotenoids and xanthophylls), or vitamin (e.g., tocopherols) composition; improved yield (e.g., improved yield under non-stress conditions or improved yield under biotic or abiotic stress); improved ability to use nitrogen or other nutrients; modified agronomic characteristics (e.g., delayed ripening; delayed senescence; earlier or later maturity; improved shade tolerance; improved resistance to root or stalk lodging; improved resistance to “green snap” of stems; modified photoperiod response); modified growth or reproductive characteristics; improved harvest, storage, or processing quality (e.g., improved resistance to pests during storage, improved fruit harvest, fruit storage, or fruit processing quality (e.g., improved resistance to pests during storage, improved resistance to breakage, improved appeal to consumers); or any combination of these traits.

[0155] In some embodiments of the invention, introduction of the isolated nucleic acid agent of the invention into the plant, and modulation of the at least one plant pathogen resistance response results in changes in height, water uptake, number of flowers, starch accumulation and Disease Sign Index of the treated plants when infected with a Candidatus Liberibacter pathogen, relative to infected plants untreated with the nucleic acid agent. In some embodiments, the parameters are increased, such as number of flowers, height and water uptake, indicating improved phenotype of the treated plants in response to the infection with Candidatus Liberibacter pathogen. In other embodiments, parameters such as starch accumulation and disease sign index (DSI) are decreased in plants receiving the isolated nucleic acid agent of the invention into the plant, and undergoing modulation of the at least one plant pathogen resistance response, indicating improved phenotype of the treated plants in response to the infection with Candidatus Liberibacter pathogen.

[0156] As used herein the term “improving” or “increasing” refers to at least about 2%, at least about 3%, at least about 4%, at least about 5%, at least about 10%, at least about 15%, at least about 20%, at least about 25%, at least about 30%, at least about 35%, at least about 40%, at least about 45%, at least about 50%, at least about 60%, at least about 70%, at least about 80%, at least about 90% or greater increase in NUE, in tolerance to stress, in growth rate, in yield, in biomass, in fruit quality, in height, in flower number, in water uptake or in vigor of a plant, as compared to the same or similar plant infected with the same pathogen or having the same disease, and not having reduced expression of at least one plant pathogen resistance gene product (i.e., plant lacking the nucleic acid agent) of the disclosure.

[0157] As used herein the term “decreasing” refers to at least about 2%, at least about 3%, at least about 4%, at least about 5%, at least about 10%, at least about 15%, at least about 20%, at least about 25%, at least about 30%, at least about 35%, at least about 40%, at least about 45%, at least about 50%, at least about 60%, at least about 70%, at least about 80%, at least about 90% or greater decrease in disease signs such as DSI, starch accumulation and the like of a plant, as compared to the same or similar plant infected with the same pathogen or having the same disease, and not having reduced expression of at least one plant pathogen resistance gene product (i.e., plant lacking the nucleic acid agent) of the disclosure.

[0158] In some embodiments, the changes in height, water uptake, number of flowers, starch accumulation and Disease Sign Index of the treated plants when infected with a Candidatus Liberibacter pathogen, relative to infected plants untreated with the nucleic acid agent is measured at a time point 2-3 weeks post infection, 3-4 weeks post infection, 5-7 weeks post infection, 1-2 months post infection, 2-4 months post infection, 4-6 months post infection, 5-8 months post infection and 5-12 months post infection or more.

[0159] According to some embodiments of the invention, plant parameters are monitored in the treated plants following introduction of the nucleic acid agent. In some embodiments, parameters of plant pathogen resistance response are monitored, for example, expression of plant pathogen resistance response genes, and/or physiological or metabolic symptoms of the expression of such plant pathogen resistance response genes. In other embodiments, instead of, or in addition to monitoring parameters of plant pathogen resistance response gene expression, parameters of the plant's tolerance to stress, growth rate, yield, biomass, fruit quality or vigor of the plant can be monitored, and can be compared to similar parameters from plants lacking the nucleic acid agent of the invention. In some embodiments, monitoring of the plant parameters (of gene expression and/or plant tolerance to stress, growth rate, etc) can be used to determine regimen of treatment of the plant, for example, additional introduction of the nucleic acid agent of the invention, augmentation of the treatment with other treatment modalities (e.g. insecticide, antibiotics, plant hormones, etc), or in order to determine timing of fruit harvest or irrigation times. Selection of plants for monitoring in a crop or field of plants can be random or systematic (for example, sentinel plants can be pre-selected prior to the treatment).

[0160] As used herein, the phrase “plant pathogen resistance response” relates to any aspect of plant response to pathogen challenge, insult or infection, including, but not limited to microbial/pathogen-associated molecular pattern- (PAMP or MAMP) triggered immunity, or PTI, and effector-triggered immunity, or ETI, including relevant signaling cascades, molecular, morphological and physiological changes such as changes in ion-flux across the plasma membrane, phytoalexin synthesis, ROS generation, mitogen activated protein (MAP) kinase activation and protein phosphorylation, pathogenesis-related protein synthesis, callose deposition, stomatal closure, growth inhibition and hypersensitive response. The hypersensitive response includes, but is not limited to cytoplasmic shrinkage, chromatin condensation, mitochondrial swelling, vacuolization and chloroplast disruption at the site of insult (and remotely, in the systemic acquired response), resulting from down-regulation of photosynthesis, increased production and accumulation of reactive oxygen species, reactive nitrogen oxide intermediates and the defense hormones salicylic and jasmonic acid, activation of MAPK cascades changes in intracellular calcium levels and transcriptional reprogramming, and occlusion of sieve elements by callose formation and P-protein accumulation.

[0161] As used herein, the phrase “plant pathogen resistance response gene” is defined as a plant gene, the expression of which is associated with, directly or indirectly, the changes occurring in a plant in response to pathogen challenge, insult or infection. The plant pathogen resistance response gene can be a plant gene, the expression of which is altered (i.e. up-regulated or down-regulated) in response to pathogen challenge, insult or infection. The term “gene” is used broadly to refer to any segment of nucleic acid associated with a biological function. Thus, genes include coding sequences and/or the regulatory sequences required for their expression. For example, gene refers to a nucleic acid fragment that expresses mRNA or functional RNA, or encodes a specific protein, and which includes regulatory sequences. Genes also include nonexpressed DNA segments that, for example, form recognition sequences for other proteins. Genes can be obtained from a variety of sources, including cloning from a source of interest or synthesizing from known or predicted sequence information, and may include sequences designed to have desired parameters.

[0162] Plant pathogen resistance genes include, but are not limited to genes for signaling cascade intermediates such as MAPK, jasmonic acid, salicylic acid and fatty acids, enzymes and proteins associated with ROS production, carbohydrate and energy metabolism, chloroplast- and photosynthesis related gene products, sugar polymer biosynthesis and degradation, sugar transport and export, volatile hormone biosynthesis and degradation, carbohydrate transport genes, “R” genes and the like. In some embodiments the plant pathogen response includes, but is not limited to changes in Salicylic acid levels, changes in Jasmonic acid levels, changes in Gibberellic acid levels, changes in Auxin levels, changes in Cytokinin levels, changes in Ethylene levels, changes in ABA phyto-hormones levels, up-regulation of phyto-hormone-related genes, biosynthesis, deposition and degradation of callose, reactive oxygen species production, functional FLS2/BAK1 complex formation, protein-kinase pathway activation, phloem blockage, starch accumulation, starch accumulation in phloem parenchyma cells, polymer sieve formation, changes in carbohydrate metabolism, cambial activity aberrations, sucrose accumulation and carotenoid synthesis.

[0163] As used herein, the phrase “plant pathogen resistance response gene product” refers to a product of the expression of a plant pathogen resistance response gene-including, but not limited to the RNA transcript of the plant pathogen resistance response gene and a peptide or polypeptide encoded by a sequence of a plant pathogen resistance response gene.

[0164] In some embodiments of the invention, modulating the at least one plant pathogen resistance response is achieved by reducing the expression of a plant pathogen resistance response gene. Thus, in some embodiments, the at least one plant pathogen resistance response gene is a plant gene whose expression is increased in association with the plant pathogen resistance response. Many plant pathogen resistance response genes which are up-regulated in response to pathogen challenge, insult or infection have been identified, mostly through expression profiles of diseased and healthy plants. For example, US Patent Publication 20080172765 to Kitagiri et al discloses plant genes, the expression of which is altered, either increased or decreased, in response to pathogen infection.

[0165] In one embodiment, the at least one plant pathogen resistance response gene is selected from the group consisting of an ADP-glucose pyrophosphorylase large subunit (AGPase) gene product, a glucose-6-phosphate/phosphate translocator (GPT) gene product, a Callose synthase gene product and a Myb transcriptional regulator (MYB) gene product.

[0166] Table II provides a partial list of plant genes (Arabidopsis homologues) associated with plant pathogen responses, which can be targets for reduction in expression by introducing the nucleic acid agent of the invention.

TABLE II
PLANT PATHOGEN RESISTANCE GENES-ARABIDOPSIS THALIANA
HOMOLOGUES (ARABIDOPSIS GENE SYMBOL)

| Seq | GENE | |
|---|---|---|
| ID NO: | SYMBOL | |
| 1 | AT1G69530.3 | member of alpha-expansin gene family |
| 2 | AT1G70710.1 | endo-1,4-beta-glucanase |
| 3 | AT3G11980.1 | similar to fatty acid reductases |
| 4 | AT2G39700.1 | putative expansin |
| 5 | AT3G44730.1 | kinesin-like protein 1 (KP1) |
| 6 | AT4G17030.1 | expansin-like B1 (EXLB1), a member of the expansin family |
| 7 | AT5G27670.1 | HTA7, a histone H2A protein |
| 8 | AT1G08560.1 | member of SYP11 syntaxin Gene Family |
| 9 | AT5G41040.1 | feruloyl-CoA transferase |
| 10 | AT1G08880.1 | HTA5, a histone H2A protein |
| 11 | AT1G09200.1 | histone superfamily protein |
| 12 | AT4G20780.1 | calcium sensor (calmoduline like 42) |
| 13 | AT1G02360.1 | chitinase family protein |
| 14 | AT1G72150.1 | novel cell-plate-associated protein (PATL1 or Patellin 1) |
| 15 | AT1G71692.1 | member of the MADS box family of transcription factors |
| 16 | AT5G59030.1 | putative copper transport protein (copper transporter 1) |
| 17 | AT1G49320.1 | USPL1 (unknown seed protein like 1) |
| 18 | ATCG00830.1 | ribosomal protein L2 |
| 19 | AT2G02780.1 | leucine-rich repeat protein kinase family protein |
| 20 | AT1G24430.1 | HXXXD-type acyl-transferase family protein |
| 21 | AT1G58170.1 | disease resistance-responsive (dirigent-like protein) family protein |
| 22 | AT3G07990.1 | serine carboxypeptidase-like 27 (SCPL27) |
| 23 | AT3G04920.1 | ribosomal protein S24e family protein |
| 24 | AT3G49340.1 | cysteine proteinases superfamily protein |
| 25 | AT5G48740.1 | leucine-rich repeat protein kinase family protein |
| 26 | AT2G04160.1 | protein similar to subtilisin-like serine protease |
| 27 | AT2G05920.1 | subtilase family protein |
| 28 | AT1G04120.1 | member of MRP subfamily/ABC transporter subfamily C |
| 29 | AT1G08830.1 | cytosolic copper/zinc superoxide dismutase CSD1 |
| 30 | AT3G17390.1 | S-adenosylmethionine synthetase |
| 31 | AT1G75040.1 | thaumatin-like protein (PR5) |
| 32 | AT3G45140.1 | chloroplast lipoxygenase (lipoxygenase 2) |
| 33 | AT5G33340.1 | protein with aspartic protease activity (CDR1, constitutive disease |
| | | resistance 1) |
| 34 | AT5G13930.1 | chalcone synthase (CHS) |
| 35 | AT1G23740.1 | oxidoreductase, zinc-binding dehydrogenase family protein |
| 36 | AT2G37040.1 | phenylalanine ammonia-lyase (PAL1) |
| 37 | AT3G46970.1 | cytosolic alpha-glucan phosphorylase |
| 38 | AT5G24090.1 | chitinase A (class III) |
| 39 | AT2G21050.1 | member of the AUX1 LAX family of auxin influx carriers (LAX2) |
| 40 | AT5G02140.1 | pathogenesis-related thaumatin superfamily protein |
| 41 | AT1G19670.1 | chlorophyllase |
| 42 | AT1G76690.1 | 12-oxophytodienoic acid reductases |
| 43 | AT3G54420.1 | EP3 chitinase |
| 44 | AT1G15010.1 | unknown protein |
| 45 | AT1G76680.2 | member of an alpha/beta barrel fold family of FMN-containing |
| | | oxidoreductases |
| 46 | AT2G02990.1 | member of the ribonuclease T2 family |
| 47 | AT4G33420.1 | peroxidase superfamily protein |
| 48 | AT5G05340.1 | peroxidase superfamily protein |
| 49 | AT4G11290.1 | peroxidase superfamily protein |
| 50 | AT2G36570.1 | leucine-rich repeat protein kinase family protein |
| 51 | AT5G06800.1 | Myb-like HTH transcriptional regulator family protein |
| 52 | AT4G08250.1 | GRAS family transcription factor |
| 53 | AT3G54320.1 | transcription factor of the AP2/ERWEBP class |
| 54 | AT1G61800.1 | glucose-6-phosphate/phosphate transporter 2 |
| 55 | AT1G05300.1 | member of Fe(II) transporter isolog family (ZIP5, zinc transporter 5 |
| | | precursor) |
| 56 | AT2G37870.1 | bifunctional inhibitor/lipid-transfer protein/seed storage 2S albumin |
| | | superfamily protein |
| 57 | AT3G13080.1 | ATP-dependent MRP-like ABC transporter |
| 58 | AT1G71050.1 | heavy metal transport/detoxification superfamily protein |
| 59 | AT3G18280.1 | bifunctional inhibitor/lipid-transfer protein/seed storage 2S albumin |
| | | superfamily protein |
| 60 | AT5G59030.1 | putative copper transport protein (copper transporter 1) |
| 61 | AT5G19600.1 | sulfate transporter Sultr3; 5. |
| 62 | AT1G69870.1 | low affinity nitrate transporter NRT1.7 |
| 63 | AT5G44560.1 | VPS2.2 |
| 64 | AT3G24450.1 | heavy metal transport/detoxification superfamily protein |
| 65 | AT1G10970.1 | member of Zrt- and Irt-related protein (ZIP) family |
| 66 | AT1G72160.1 | sec14p-like phosphatidylinositol transfer family protein |
| 67 | AT3G22910.1 | ATPase E1-E2 type family protein/haloacid dehalogenase-like |
| | | hydrolase family protein |
| 68 | AT1G30690.1 | sec14p-like phosphatidylinositol transfer family protein |
| 69 | AT5G65980.1 | auxin efflux carrier family protein |
| 70 | AT3G51670.1 | SEC14 cytosolic factor family protein/phosphoglyceride transfer |
| | | family protein |
| 71 | AT2G14580.1 | pathogenesis related protein (basic PR1-like protein) |
| 72 | AT5G51920.1 | pyridoxal phosphate (PLP)-dependent transferases superfamily |
| | | protein |
| 73 | AT4G03620.1 | myosin heavy chain-related |
| 74 | AT4G25000.1 | secreted protein involved in starch mobilization |
| 75 | AT3G02885.1 | GAST1 protein homolog 5 (GASA5) |
| 76 | AT4G39230.1 | similar to phenylcoumaran benzylic ether reductase (PCBER) |
| 77 | AT2G18420.1 | gibberellin-regulated GASA/GAST/Snakin family protein |
| 78 | AT1G14520.1 | MIOX1 (myo-inositol oxygenase) |
| 79 | AT4G15800.1 | similar to tobacco rapid alkalinization factor (RALF) |
| 80 | AT3G08860.1 | protein with beta-alanine aminotransferase activity |
| 81 | AT2G44740.1 | cyclin p4; 1 (CYCP4; 1); |
| 82 | AT3G11520.1 | B-type mitotic cyclin |
| 83 | AT5G67070.1 | similar to tobacco rapid alkalinization factor (RALF) |
| 84 | AT3G47800.1 | galactose mutarotase-like superfamily protein |
| 85 | AT3G19000.1 | 2-oxoglutarate (2OG) and Fe(II)-dependent oxygenase superfamily |
| | | protein |
| 86 | AT3G44830.1 | lecithin: cholesterol acyltransferase family protein |
| 87 | AT5G23960.1 | sesquiterpene synthase |
| 88 | AT4G39210.1 | large subunit of ADP-glucose pyrophosphorylase |
| 89 | AT3G13610.1 | 2-oxoglutarate (2OG) and Fe(II)-dependent oxygenase superfamily |
| | | protein |
| 90 | AT5G66150.1 | glycosyl hydrolase family 38 protein |
| 91 | AT1G60470.1 | galactinol synthase 4 (GolS4) |
| 92 | AT1G09400.1 | FMN-linked oxidoreductases superfamily protein |
| 93 | AT5G15140.1 | galactose mutarotase-like superfamily protein |
| 94 | AT1G73010.1 | PPsPase1, a pyrophosphate-specific phosphatase (phosphate |
| | | starvation-induced gene 2 or PS2) |
| 95 | AT5G36160.1 | tyrosine transaminase family protein |
| 96 | AT1G17710.1 | pyridoxal phosphate phosphatase-related protein |
| 97 | AT3G22360.1 | alternative oxidase (AOX1B) |
| 98 | AT1G07180.1 | internal mitochondrial NAD(P)H dehydrogenase |
| 99 | AT5G33370.1 | GDSL-like lipase/acylhydrolase superfamily protein |
| 100 | AT1G21850.1 | SKU5 similar 8 (sks8) |
| 101 | AT1G55120.1 | protein with fructan exohydrolase (FEH) activity |
| 102 | AT1G71380.1 | cellulase 3 (CEL3) |
| 103 | AT1G73880.1 | UDP-glucosyl transferase 89B1 (UGT89B1) |
| 104 | AT5G20870.1 | O-glycosyl hydrolases family 17 protein |
| 105 | AT2G29980.1 | endoplasmic reticulum enzyme responsible for the synthesis of |
| | | 18:3 fatty acids from phospholipids |
| 106 | AT5G22810.1 | GDSL-like lipase/acylhydrolase superfamily protein |
| 107 | AT1G33720.1 | member of CYP76C (cytochrome P450) |
| 108 | AT5G56970.1 | similar to cytokinin oxidase/dehydrogenase (cytokinin oxidase 3) |
| 109 | AT1G41830.1 | SKU5-similar 6 (SKS6) |
| 110 | AT4G31950.1 | member of CYP82C (cytochrome P450) |
| 111 | AT1G22380.1 | putative UDP-glucosyl transferase |
| 112 | AT3G57270.1 | member of glycosyl hydrolase family 17 beta-1,3-glucanase 1) |
| 113 | AT3G03350.2 | NAD(P)-binding Rossmann-fold superfamily protein |
| 114 | AT1G73370.1 | protein with sucrose synthase activity (SUS6) |
| 115 | AT1G22650.1 | plant neutral invertase family protein |
| 116 | AT5G13870.1 | endoxyloglucan transferase EXGT-A4 |
| 117 | AT4G38540.1 | FAD/NAD(P)-binding oxidoreductase family protein |
| 118 | AT2G37700.1 | fatty acid hydroxylase superfamily |
| 119 | AT5G36110.1 | member of CYP716A, cytochrome P450 |
| 120 | AT1G09155.1 | phloem protein 2-B15 (PP2-B15) |
| 121 | AT1G12030.1 | unknown protein |
| 122 | AT1G17860.1 | Kunitz family trypsin and protease inhibitor protein |
| 123 | AT4G35150.1 | O-methyltransferase family protein |
| 124 | AT4G36850.1 | PQ-loop repeat family protein/transmembrane family protein |
| 125 | AT3G43110.1 | unknown protein |
| 126 | AT5G02580.1 | protein 1589 of unknown function |
| 127 | AT5G62360.1 | invertase/pectin methylesterase inhibitor superfamily protein |
| 128 | AT1G63310.1 | unknown protein |
| 129 | AT5G66430.1 | S-adenosyl-L-methionine-dependent methyltransferases |
| | | superfamily protein |
| 130 | AT2G18660.1 | PNP-A (Plant Natriuretic Peptide A) |
| 131 | AT3G01670.1 | unknown protein |
| 132 | AT3G20570.1 | early nodulin-like protein 9 (ENODL9) |
| 133 | AT1G55290.1 | similar to oxidoreductase, 2OG-Fe(II) oxygenase |
| 134 | AT5G04010.1 | F-box family protein |
| 135 | AT5G67140.1 | F-box/RNI-like superfamily protein |
| 136 | AT3G01680.1 | protein with Mediator complex subunit Med28 |
| 137 | AT2G32280.1 | protein of unknown function (DUF1218) |
| 138 | AT3G42725.1 | putative membrane lipoprotein |
| 139 | AT5G39050.1 | HXXXD-type acyl-transferase family protein |
| 140 | AT3G15650.2 | alpha/beta-Hydrolases superfamily protein |
| 141 | AT2G41200.1 | unknown protein |
| 142 | AT2G42820.1 | HVA22-like protein F (HVA22F) |
| 143 | AT2G47780.1 | rubber elongation factor protein (REF) |
| 144 | AT3G17380.1 | TRAF-like family protein |
| 145 | AT4G35160.1 | O-methyltransferase family protein |
| 146 | AT4G31840.1 | early nodulin-like protein 15 (ENODL15) |
| 147 | AT3G17350.1 | unknown protein |
| 148 | AT3G50930.1 | cytochrome BC1 synthesis (BCS1) |
| 149 | AT5G22740.1 | beta-mannan synthase |
| 150 | AT3G54040.1 | PAR1 protein |
| 151 | AT2G46490.1 | unknown protein |
| 152 | AT5G66920.1 | SKU5 similar 17 (sks17) |
| 153 | AT2G03430.1 | ankyrin repeat family protein |
| 154 | AT2G32300.1 | uclacyanin 1 |
| 155 | AT4G24780.1 | pectin lyase-like superfamily protein |
| 156 | AT5G23660.1 | homolog of the Medicago nodulin MTN3 |
| 157 | AT5G16250.1 | unknown protein |
| 158 | AT4G27900.1 | CCT motif family protein |
| 159 | AT3G01680.1 | unknown protein |
| 160 | AT3G59940.1 | galactose oxidase/kelch repeat superfamily protein |
| 161 | AT1G70470.1 | unknown protein |
| 162 | AT2G32280.1 | unknown protein |
| 163 | AT2G25737.1 | sulfite exporter TauE/SafE family protein |
| 164 | AT2G01610.1 | plant invertase/pectin methylesterase inhibitor superfamily protein |
| 165 | AT5G62350.1 | plant invertase/pectin methylesterase inhibitor superfamily protein |
| 166 | AT2G25625.1 | unknown protein |
| 167 | AT1G60390.1 | polygalacturonase 1 (PG1) |
| 168 | AT1G72000.1 | plant neutral invertase family protein |
| 169 | AT5G05270.1 | chalcone-flavanone isomerase family protein |
| 170 | AT4G31590.1 | similar to cellulose synthase |
| 171 | AT5G35740.1 | carbohydrate-binding X8 domain superfamily protein |
| 172 | AT2G46630.1 | unknown protein |
| 173 | AT5G44400.1 | FAD-binding berberine family protein |
| 174 | AT1G05560.1 | UDP-GLUCOSE TRANSFERASE 1 |
| 175 | AT1G05570.1 | CALLOSE SYNTHASE 1 |
| 176 | AT1G06490.1 | GLUCAN SYNTHASE-LIKE 7 |
| 177 | AT2G13680.1 | GLUCAN SYNTHASE-LIKE 2 |
| 178 | AT2G31960.1 | GLUCAN SYNTHASE-LIKE 3 |
| 179 | AT3G14570.1 | GLUCAN SYNTHASE-LIKE 4 |
| 180 | AT3G59100.1 | GLUCAN SYNTHASE-LIKE 11 |
| 181 | AT4G03550.1 | ENHANCER OF EDR1 3 GLUCAN SYNTHASE-LIKE 5 |
| 182 | AT4G04970.1 | GLUCAN SYNTHASE LIKE 1 |
| 183 | AT5G13000.1 | CALLOSE SYNTHASE 3 |
| 184 | AT5G13000.2 | GLUCAN SYNTHASE-LIKE 12 |
| 185 | AT5G36870.1 | GLUCAN SYNTHASE-LIKE 9 |

[0167] Thus, in some embodiments, the isolated nucleic acid agent comprises a nucleic sequence which specifically reduces a plant pathogen resistance gene product having at least 60% sequence identity to any of the sequences of TABLE II. In some embodiments, the plant pathogen gene product is 60-75% identical, 70-85% identical, 80-90% identical, 90-95% identical or 100% identical to the sequence of Table II.

[0168] In some embodiments, the targeted gene products include, but are not limited to polynucleotide sequences having at least 60% identity to any of the sequences of TABLE III. In some embodiments, the plant pathogen gene product is 60-75% identical, 70-85% identical, 80-90% identical, 90-95% identical or 100% identical to the sequence of Table III.

TABLE III
ABBREVIATED LIST of PLANT PATHOGEN RESISTANCE
GENES-ARABIDOPSIS THALIANA HOMOLOGUES

| Seq | GENE | |
|---|---|---|
| ID NO: | SYMBOL | |
| 186 | AT1G70710.1 | endo-1,4-beta-glucanase |
| 187 | AT4G20780.1 | calcium sensor (calmoduline like 42) |
| 188 | AT5G59030.1 | putative copper transport protein (copper |
| | | transporter 1) |
| 189 | AT1G58170.1 | disease resistance-responsive (dirigent-like |
| | | protein) family protein |
| 190 | AT1G08830.1 | cytosolic copper/zinc superoxide dismutase |
| | | CSD1 |
| 191 | AT3G17390.1 | S-adenosylmethionine synthetase |
| 192 | AT3G45140.1 | chloroplast lipoxygenase (lipoxygenase 2) |
| 193 | AT5G33340.1 | protein with aspartic protease activity (CDR1, |
| | | constitutive disease resistance 1) |
| 194 | AT5G13930.1 | chalcone synthase (CHS) |
| 195 | AT5G06800.1 | Myb-like HTH transcriptional regulator family |
| | | protein |
| 196 | AT1G61800.1 | glucose-6-phosphate/phosphate transporter 2 |
| 197 | AT4G39210.1 | large subunit of ADP-glucose pyrophosphory- |
| | | lase |
| 198 | AT1G73880.1 | UDP-glucosyl transferase 89B1 (UGT89B1) |
| 199 | AT1G22380.1 | putative UDP-glucosyl transferase |
| 200 | AT1G09155.1 | phloem protein 2-B15 (PP2-B15) |
| 201 | AT1G17860.1 | Kunitz family trypsin and protease inhibitor |
| | | protein |
| 202 | AT5G05270.1 | chalcone-flavanone isomerase family protein |
| 203 | AT4G31590.1 | similar to cellulose synthase |

[0169] Thus, according to some embodiments of the invention there is provided an isolated nucleic acid agent comprising a nucleic acid sequence which specifically reduces the expression of at least one plant pathogen resistance gene product.

[0170] In some embodiments, the isolated nucleic acid agent comprises a nucleic sequence which specifically reduces a plant pathogen resistance gene product having at least 60%, sequence identity to any of the sequences of TABLE II.

[0171] HuangLongBing is predominately a disease of citrus and citrus-related plants and trees. Thus, in some embodiments, the isolated nucleic acid of the invention is directed to downregulation of citrus-specific gene products.

[0172] Table IV provides a partial list of citrus plant polynucleotide sequences associated with citrus plant pathogen responses, which can be targets for reduction in expression by introducing the nucleic acid agent of the invention. Table IV(a) provides a further list of candidate targets for reduction of gene expression, based on function of the specified gene-sequences in italics are citrus pathogen plant response-associated sequences, while the bolded sequences are sugar metabolism-related genes.

TABLE IV
CITRUS TARGET SEQUENCES (GenBank Accession Nos.)

| Seq ID NO: | GENE SYMBOL |
|---|---|
| 204 | DN959507 |
| 205 | CD573747 |
| 206 | CF828218 |
| 207 | CV710432 |
| 208 | CD575625 |
| 209 | CF835126 |
| 210 | CF505371 |
| 211 | CX675973 |
| 212 | CV719481 |
| 213 | CX642677 |
| 214 | CK935733 |
| 215 | CX643907 |
| 216 | CX296236 |
| 217 | CF832155 |
| 218 | CX053912 |
| 219 | CX643504 |
| 220 | CX077483 |
| 221 | DN618428 |
| 222 | CX666928 |
| 223 | CX675636 |
| 224 | CD574876 |
| 225 | CX663894 |
| 226 | CF838213 |
| 227 | CV884462 |
| 228 | CB292401 |
| 229 | DN623815 |
| 230 | CX635745 |
| 231 | CX301461 |
| 232 | CX672038 |
| 233 | CX045698 |
| 234 | C95463 |
| 235 | CX673765 |
| 236 | CB290861 |
| 237 | CN188208 |
| 238 | CF504694 |
| 239 | CX674093 |
| 240 | CK936991 |
| 241 | CF509114 |
| 242 | CX643181 |
| 243 | CX665015 |
| 244 | CX043703 |
| 245 | CX668229 |
| 246 | CX053885 |
| 247 | CX299724 |
| 248 | DR403986 |
| 249 | CX663493 |
| 250 | CX663308 |
| 251 | DN623584 |
| 252 | CK934943 |
| 253 | CX044216 |
| 254 | CX078485 |
| 255 | CX046318 |
| 256 | CX303177 |
| 257 | CF53269 |
| 258 | CX287481 |
| 259 | CK739465 |
| 260 | CX675684 |
| 261 | CF835779 |
| 262 | DN620798 |
| 263 | CX051466 |
| 264 | CF836284 |
| 265 | CX286914 |
| 266 | CF418391 |
| 267 | CX293439 |
| 268 | CX664023 |
| 269 | CV720146 |
| 270 | CF508503 |
| 271 | CN185151 |
| 272 | CF835597 |
| 273 | CV885632 |
| 274 | CX665957 |
| 275 | DN619087 |
| 276 | CF417971 |
| 277 | CX674752 |
| 278 | CX672325 |
| 279 | CX675696 |
| 280 | CB290596 |
| 281 | CX075198 |
| 282 | DN618043 |
| 283 | CV704545 |
| 284 | CX671045 |
| 285 | CF653559 |
| 286 | CX640391 |
| 287 | CX302689 |
| 288 | DN958063 |
| 289 | CB250380 |
| 290 | CX543436 |
| 291 | CF508354 |
| 292 | CN184547 |
| 293 | CF837402 |
| 294 | DT214662 |
| 295 | CF507791 |
| 296 | CV716571 |
| 297 | CN184617 |
| 298 | CX666534 |
| 299 | CX293884 |
| 300 | CF418573 |
| 301 | DN795637 |
| 302 | DN622894 |
| 303 | DN799150 |
| 304 | CX671694 |
| 305 | DN619965 |
| 306 | CX664606 |
| 307 | CX544543 |
| 308 | DN618893 |
| 309 | CV714863 |
| 310 | DN795132 |
| 311 | CX293755 |
| 312 | CF417383 |
| 313 | AU300374 |
| 314 | CX046632 |
| 315 | CX663293 |
| 316 | CK933255 |
| 317 | CV709925 |
| 318 | CX077593 |
| 319 | BQ624438 |
| 320 | CN189092 |
| 321 | CX075046 |
| 322 | CF832471 |
| 323 | CX308646 |
| 324 | CN192282 |
| 325 | CX307078 |
| 326 | C95332 |
| 327 | CX295397 |
| 328 | CN181803 |
| 329 | CX076871 |
| 330 | CN191204 |
| 331 | CV704769 |
| 332 | CF417791 |
| 333 | CF831073 |
| 334 | CX664109 |
| 335 | CK934765 |
| 336 | DN622570 |
| 337 | CX302870 |
| 338 | CX298333 |
| 339 | CN191069 |
| 340 | C22284 |
| 341 | CK936315 |
| 342 | CX665686 |
| 343 | CD576001 |
| 344 | CV885460 |
| 345 | CX674613 |
| 346 | CV707520 |
| 347 | DN623989 |
| 348 | CX641508 |
| 349 | CV718422 |
| 350 | CX669149 |
| 351 | CV708715 |
| 352 | BQ623232 |
| 353 | CF418736 |
| 354 | DN959078 |
| 355 | CV708663 |
| 356 | CX673097 |
| 357 | CX302123 |
| 358 | CN187632 |
| 359 | CX673300 |
| 360 | CK701797 |
| 361 | CX635438 |
| 362 | CX545339 |
| 363 | CX053315 |
| 364 | CV709535 |
| 365 | DN798478 |
| 366 | CB292827 |
| 367 | CX671357 |
| 368 | CX069447 |
| 369 | CX287588 |
| 370 | CX297166 |
| 371 | CK934054 |
| 372 | CB291312 |
| 373 | CX076597 |
| 374 | CX301940 |
| 375 | CX544117 |
| 376 | CK665535 |
| 377 | CX669825 |
| 378 | CX670154 |
| 379 | CX674833 |
| 380 | CX072993 |
| 381 | CX641923 |
| 382 | CV709392 |
| 383 | CK936214 |
| 384 | CK936713 |
| 385 | CX046656 |
| 386 | CN190414 |
| 387 | DN618740 |
| 388 | CX667496 |
| 389 | CK933819 |
| 390 | CX666282 |
| 391 | BQ624534 |
| 392 | CD574984 |
| 393 | CX299253 |
| 394 | U82977.1 |
| 395 | DN959563 |
| 396 | DN625629 |
| 397 | DN622423 |
| 398 | DN621393 |
| 399 | DN620655 |
| 400 | DN617955 |
| 401 | DN617601 |
| 402 | CX675719 |
| 403 | CX673052 |
| 404 | CX671909 |
| 405 | CX671908 |
| 406 | CX669790 |
| 407 | CX667860 |
| 408 | CX667462 |
| 409 | CX666073 |
| 410 | CX663867 |
| 411 | CX663363 |
| 412 | CX643067 |
| 413 | CX640562 |
| 414 | CX636575 |
| 415 | CX636360 |
| 416 | CX635683 |
| 417 | CX546685 |
| 418 | CX545718 |
| 419 | CX544442 |
| 420 | CX543942 |
| 421 | CX543689 |
| 422 | CX542606 |
| 423 | CX309167 |
| 424 | CX308494 |
| 425 | CX307626 |
| 426 | CX307101 |
| 427 | CX306527 |
| 428 | CX305853 |
| 429 | CX304999 |
| 430 | CX303309 |
| 431 | CX302610 |
| 432 | CX301947 |
| 433 | CX297896 |
| 434 | CX296140 |
| 435 | CX296097 |
| 436 | CX295546 |
| 437 | CX290706 |
| 438 | CX289600 |
| 439 | CX288823 |
| 440 | CX287363 |
| 441 | CK078233 |
| 442 | CX078190 |
| 443 | CX076996 |
| 444 | CX070279 |
| 445 | CX048605 |
| 446 | CX048208 |
| 447 | CX047376 |
| 448 | CX046977 |
| 449 | CX046019 |
| 450 | CX043864 |
| 451 | CV887291 |
| 452 | CV886686 |
| 453 | CV886073 |
| 454 | CV884354 |
| 455 | CV720075 |
| 456 | CV719759 |
| 457 | CV719483 |
| 458 | CV719426 |
| 459 | CV717016 |
| 460 | CV716643 |
| 461 | CV714792 |
| 462 | CV714551 |
| 463 | CV714253 |
| 464 | CV713804 |
| 465 | CV713122 |
| 466 | CV713085 |
| 467 | CV711700 |
| 468 | CV710341 |
| 469 | CV709126 |
| 470 | CV707867 |
| 471 | CV706656 |
| 472 | CV705672 |
| 473 | CV705217 |
| 474 | CV704366 |
| 475 | CN191865 |
| 476 | CN186090 |
| 477 | CN185887 |
| 478 | CN182557 |
| 479 | CN182178 |
| 480 | CK939832 |
| 481 | CK939153 |
| 482 | CK938892 |
| 483 | CK938479 |
| 484 | CK936961 |
| 485 | CK933484 |
| 486 | CK702328 |
| 487 | CF836843 |
| 488 | CF836817 |
| 489 | CF835056 |
| 490 | CF833518 |
| 491 | CF418886 |
| 492 | CF418485 |
| 493 | CD576435 |
| 494 | CD576111 |
| 495 | CD575905 |
| 496 | CD575735 |
| 497 | CD575303 |
| 498 | CD575247 |
| 499 | CD574599 |
| 500 | CD573799 |
| 501 | CB611071 |
| 502 | CB322174 |
| 503 | CB305061 |
| 504 | CB291815 |
| 505 | CB291722 |
| 506 | CB291657 |

TABLE IV(a)

| | SEQ | |
|---|---|---|
| Gene Symb. | ID NO | |
| CX303072 | 623 | Beta-glucosidase-like |
| DN622894 | 624 | ADP-glucose pyrophosphorylase |
| DN625620 | 625 | Glucose-6-phosphate dehydrogenase |
| CB292132 | 626 | Granule-ground starch synthase |
| CX637561 | 627 | Putative UDP-glucuronosyltransferase |
| DT214451 | 628 | Beta-amylase |
| CX046632 | 629 | Extracellular acid invertase |
| CX070113 | 630 | Starch branching enzyme |
| CB292174 | 631 | Sugar transport protein |
| CX045485 | 632 | Hexose transporter |
| CX665157 | 633 | Galactose oxidase |
| CX639454 | 634 | Plant glycogenin-like starch initiation |
| | | protein |
| CX663848 | 635 | Glycosyl transferase |
| CV705038 | 636 | 4-alpha-galacturonosyltransferase |
| CF831824 | 637 | Trehalose-phosphatase |
| CK938541 | 638 | Galacturonosyltransferase |
| CX294095 | 639 | Glycosyl hydrolase |
| CN187456 | 640 | Trehalose-phosphatase |
| CK938256 | 641 | Mannase |
| CV886325 | 642 | Glycerol-3-phosphate dehydrogenase |
| DN617689 | 643 | Raffinose synthase |
| CF836851 | 644 | Probable alcohol degydrogenase |
| DN959139 | 645 | Trehalose-6-phosphate phosphatase |
| CX044393 | 646 | Probable short chain alcohol dehydrogenase |
| CK936380 | 647 | Alcohol acyl transferase |
| BQ623570 | 648 | Dirigent protein |
| CX309407 | 649 | Alpha-glucosidase-like |
| CX668300 | 650 | Chitinase |
| CF832155 | 651 | Acidic class II chitinase |
| CX638776 | 652 | Delta 1-pyrroline-5-carboxylate synthetase |
| CK937251 | 653 | Miraculin-like protein |
| CX303148 | 654 | Nam-like protein 11 |
| CN186431 | 655 | CTV protein |
| CX301461 | 656 | Unnamed protein product |
| DN619110 | 657 | Unknown protein |
| CX669483 | 658 | Early nodulin |
| DN618893 | 659 | Tyrosine aminotransferase |
| CX306211 | 660 | Nectarin 5 |
| CF507855 | 661 | Delta 1-pyrroline-5-carboxylate synthetase 2 |
| CF653559 | 662 | Pathogenesis-related protein PR-1 precursor |
| CK935794 | 663 | Glycolate oxidase |
| CX666928 | 664 | BURP domain-containing protein |
| CX305834 | 665 | Seed-specific protein |
| CX640129 | 666 | Glutaredoxin-like protein |
| CK935883 | 667 | Disease resistance-responsive protein |
| CX045772 | 668 | Putative cell death associated protein |
| CN191283 | 669 | NAM-like protein |
| CK934775 | 670 | Disease-resistance protein |
| CX286941 | 671 | Nodulin-like |
| CX301618 | 672 | Dehydration-responsive protein RD22 |
| CX296222 | 673 | Blight-associated protein p12 precursor |
| CX641603 | 674 | Disease-resistance protein |
| DR406181 | 675 | Metallothionein-like protein |
| CB293886 | 676 | NAM-like protein |
| CF835337 | 677 | Pathogenesis-related protein 4A |
| CX048331 | 678 | Putative ripening-related protein |
| CX637285 | 679 | Pathogenesis-related protein 4A |
| CX044399 | 680 | NBS-LRR resistance-like protein RGC359 |
| DN618428 | 681 | BURP-domain containing protein |
| CX545242 | 682 | Berberine bridge enzyme-like protein |
| AU186381 | 683 | Acidic class II chitinase |
| DN958104 | 684 | Beta-cyanoalanine synthase |
| CX076066 | 685 | Resistance protein candidate RGC2J |
| CF835944 | 686 | MLO protein (mildew resistance locus) |
| CX671223 | 687 | Chitinase |
| AU300664 | 688 | Pathogenesis-related protein |
| CF832471 | 689 | Multi-copper oxidase |
| DN795254 | 690 | Putative calmodulin-binding protein |
| CX292843 | 691 | Photoassimilate-responsive protein |
| CF507442 | 692 | Nodulin-like protein |
| CX305678 | 693 | Basic chitinase |
| CX048700 | 694 | Leucine-rich repeat protein |
| DN625052 | 695 | Disease resistance RGA3 protein |
| CX070975 | 696 | Small MW heat shock protein |
| CX671683 | 697 | Nodulin-like protein |
| DN618117 | 698 | NBS-LRR type disease resistance protein |
| CX045895 | 699 | Chitinase |
| CX291159 | 700 | Elicitor-inducible cytochrome P450 |
| CF833037 | 701 | Putative salicylate monooxygenase |
| CF829440 | 702 | Pectate lyase |
| CV709277 | 703 | Phosphoesterase family protein |
| CX069929 | 704 | Abl interactor-like protein-1 |
| CX643843 | 705 | Putative BURP domain containing protein |
| CX293287 | 706 | Putative nodulin protein |
| CO913159 | 707 | Glyoxal oxidase related |
| CF838393 | 708 | Chitinase class II precursor |
| CX637639 | 709 | Chitinase |
| CK936056 | 710 | Subtilisin-like protease |
| CF417485 | 711 | ENSP-like protein |
| CX296119 | 712 | Immediate-early fungal elicitor protein CMPG1 |
| CN181971 | 713 | Disease resistance LRR family protein |
| CX076036 | 714 | Avr9 Cf-9 rapidly elicited protein 111B |

[0173] In some embodiments, the nucleic acid agent of the invention is directed towards any one or more subset of the sequences of Tables IV and IV(a). Table V provides an exemplary subset of citrus plant polynucleotide sequences associated with citrus plant pathogen responses, which are also suitable targets for reduction in expression by introducing the nucleic acid agent and methods of the invention.

TABLE V
ABBREVIATED LIST OF CITRUS TARGET
SEQUENCES (GenBank Accession No.)

| | GENE |
|---|---|
| Seq ID NO: | SYMBOL |
| 205 | CD573747 |
| 216 | CX296236 |
| 220 | CX077483 |
| 226 | CF838213 |
| 231 | CX301461 |
| 235 | CX673765 |
| 236 | CB290861 |
| 238 | CF504694 |
| 239 | CX674093 |
| 240 | CK936991 |
| 258 | CX287481 |
| 261 | CF835779 |
| 263 | CX051466 |
| 269 | CV720146 |
| 302 | DN622894 |
| 324 | CN192282 |
| 333 | CF831073 |
| 335 | CK934765 |
| 339 | CN191069 |
| 379 | CX674833 |
| 389 | CK933819 |
| 390 | CX666282 |

[0174] In some embodiments, the isolated nucleic acid agent comprises a nucleic acid sequence which specifically reduces any of plant pathogen resistance gene products of the sequences of TABLES IV and IV(a). In other embodiments, the isolated nucleic acid agent comprises a nucleic acid sequence which specifically reduces any of plant pathogen resistance gene products of the sequences of TABLE V.

[0175] In some embodiments, the isolated nucleic acid agent comprises a nucleic acid sequence which specifically reduces the gene products of a gene selected from the group consisting of the AGPase gene, the GPT gene, the Callose synthase gene, the Lipoxygenase D gene, the Myb gene and the PP2-B-15 gene. In some embodiments, the AGPase gene product is encoded by SEQ ID NO: 527, or a portion thereof, the GPT gene product is encoded by SEQ ID NO: 529 or a portion thereof, the Callose synthase gene product is encoded by SEQ ID NO: 531 or a portion thereof, the Lipoxygenase D gene product is encoded by SEQ ID NO: 533 or a portion thereof, the Myb gene product is encoded by SEQ ID NO: 535 or a portion thereof, and the PP2 gene product is encoded by SEQ ID NO: 537 or a portion thereof.

[0176] In some embodiments, the isolated nucleic acid agent comprises a nucleic acid sequence comprising a nucleic acid sequence complementary to a portion of the nucleic acid sequence of the gene product of any one of the AGPase gene, the GPT gene, the Callose synthase gene, the Lipoxygenase D gene, and the Myb gene, which specifically reduces the gene products of the corresponding gene. In some embodiments, the nucleic acid sequence targeting the AGPase gene comprises SEQ ID NO: 528, or a portion thereof, the nucleic acid sequence targeting the GPT gene comprises SEQ ID NO: 530, or a portion thereof, the nucleic acid sequence targeting the Callose synthase gene comprises SEQ ID NO: 532, or a portion thereof, the nucleic acid sequence targeting the Lipoxygenase D gene comprises SEQ ID NO: 534, or a portion thereof, the nucleic acid sequence targeting the Myb gene comprises SEQ ID NO: 536, or a portion thereof and the nucleic acid sequence targeting the PP2 gene comprises SEQ ID NO: 538, or a portion thereof.

[0177] In some embodiments of aspects of the invention, the nucleic acid agent is a double stranded RNA (dsRNA). As used herein the term “dsRNA” relates to two strands of anti-parallel polyribonucleic acids held together by base pairing. The two strands can be of identical length or of different lengths provided there is enough sequence homology between the two strands that a double stranded structure is formed with at least 80%, 90%, 95% or 100% complementarity over the entire length. According to an embodiment of the invention, there are no overhangs for the dsRNA molecule. According to another embodiment of the invention, the dsRNA molecule comprises overhangs. According to other embodiments, the strands are aligned such that there are at least 1, 2, or 3 bases at the end of the strands which do not align (i.e., for which no complementary bases occur in the opposing strand) such that an overhang of 1, 2 or 3 residues occurs at one or both ends of the duplex when strands are annealed.

[0178] It will be noted that the dsRNA can be defined in terms of the nucleic acid sequence of the DNA encoding the target gene transcript, and it is understood that a dsRNA sequence corresponding to the coding sequence of a gene comprises an RNA complement of the gene's coding sequence, or other sequence of the gene which is transcribed into RNA.

[0179] Thus, in some embodiments, the isolated nucleic acid agent comprises a nucleic sequence which is complementary to a nucleic acid sequence having at least 60% sequence identity to any of the sequences of TABLE II or TABLE III. In some embodiments, the nucleic acid sequence is 60-75% identical, 70-85% identical, 80-90% identical, 90-95% identical or 100% identical to the sequence of Table II or III.

[0180] In other embodiments, wherein the plant or tree is a citrus or citrus-related plant or tree, the isolated nucleic acid agent comprises a nucleic sequence complementary to any of the polynucleotide sequences of TABLES IV and IV(a). In still other embodiments, the plant is a citrus or citrus-related plant or tree and the isolated nucleic acid agent comprises a nucleic sequence which is complementary to any of the polynucleotide sequences of TABLE V.

[0181] The inhibitory RNA sequence can be greater than 90% identical, or even 100% identical, to the portion of the target gene transcript. Alternatively, the duplex region of the RNA may be defined functionally as a nucleotide sequence that is capable of hybridizing with a portion of the target gene transcript under stringent conditions (e.g., 400 mM NaCl, 40 mM PIPES pH 6.4, 1 mM EDTA, 60 degrees C. hybridization for 12-16 hours; followed by washing). The length of the double-stranded nucleotide sequences complementary to the target gene transcript may be at least about 18, 19, 21, 25, 50, 100, 200, 300, 400, 491, 500, or more bases. In some embodiments of some aspects of the invention, the length of the double-stranded nucleotide sequence is approximately from about 18 to about 510 nucleotides in length for genes of Citrus spp. Such as, but not limited to sweet oranges: Citrus sinensis, lemons: Citrus limon and sour orange: Citrus aurantium.

[0182] The term “corresponds to” as used herein means a polynucleotide sequence homologous to all or a portion of a reference polynucleotide sequence. In contradistinction, the term “complementary to” is used herein to mean that the complementary sequence is homologous to all or a portion of a reference polynucleotide sequence. For example, the nucleotide sequence “TATAC” corresponds to a reference sequence “TATAC” and is complementary to a reference sequence “GTATA”.

[0183] The present teachings relate to various lengths of dsRNA, whereby the shorter version i.e., x is shorter or equals 50 bp (e.g., 17-50), is referred to as siRNA or miRNA. Longer dsRNA molecules of 51-600 are referred to herein as dsRNA, which can be further processed for siRNA molecules. According to some embodiments, the nucleic acid sequence of the dsRNA is greater than 15 base pairs in length. According to yet other embodiments, the nucleic acid sequence of the dsRNA is 19-25 base pairs in length, 30-100 base pairs in length, 100-250 base pairs in length or 100-500 base pairs in length. According to still other embodiments, the dsRNA is 300-600 base pairs in length, 350-500 base pairs in length or 400-450 base pairs in length. In some embodiments, the dsRNA is 400 base pairs in length.

[0184] The term “siRNA” refers to small inhibitory RNA duplexes (generally between 17-30 basepairs, but also longer e.g., 31-50 bp) that induce the RNA interference (RNAi) pathway. Typically, siRNAs are chemically synthesized as 21mers with a central 19 bp duplex region and symmetric 2-base 3′-overhangs on the termini, although it has been recently described that chemically synthesized RNA duplexes of 25-30 base length can have as much as a 100-fold increase in potency compared with 21mers at the same location. The observed increased potency obtained using longer RNAs in triggering RNAi is theorized to result from providing Dicer with a substrate (27mer) instead of a product (21mer) and that this improves the rate or efficiency of entry of the siRNA duplex into RISC.

[0185] It has been found that position of the 3′-overhang influences potency of an siRNA and asymmetric duplexes having a 3′-overhang on the antisense strand are generally more potent than those with the 3′-overhang on the sense strand (Rose et al., 2005). This can be attributed to asymmetrical strand loading into RISC, as the opposite efficacy patterns are observed when targeting the antisense transcript.

[0186] The strands of a double-stranded interfering RNA (e.g., an siRNA) may be connected to form a hairpin or stem-loop structure (e.g., an shRNA). Thus, as mentioned the RNA silencing agent of some embodiments of the invention may also be a short hairpin RNA (shRNA).

[0187] The term “shRNA”, as used herein, refers to an RNA agent having a stem-loop structure, comprising a first and second region of complementary sequence, the degree of complementarity and orientation of the regions being sufficient such that base pairing occurs between the regions, the first and second regions being joined by a loop region, the loop resulting from a lack of base pairing between nucleotides (or nucleotide analogs) within the loop region. The number of nucleotides in the loop is a number between and including 3 to 23, or 5 to 15, or 7 to 13, or 4 to 9, or 9 to 11. Some of the nucleotides in the loop can be involved in base-pair interactions with other nucleotides in the loop. Examples of oligonucleotide sequences that can be used to form the loop include 5′-UUCAAGAGA-3 (Brummelkamp, T. R. et al. (2002) Science 296: 550, SEQ ID NO: 517) and 5′-UUUGUGUAG-3′ (Castanotto, D. et al. (2002) RNA 8:1454, SEQ ID NO: 518). It will be recognized by one of skill in the art that the resulting single chain oligonucleotide forms a stem-loop or hairpin structure comprising a double-stranded region capable of interacting with the RNAi machinery.

[0188] As used herein, the phrase “microRNA (also referred to herein interchangeably as “miRNA” or “miR”) or a precursor thereof” refers to a microRNA (miRNA) molecule acting as a post-transcriptional regulator. Typically, the miRNA molecules are RNA molecules of about 20 to 22 nucleotides in length which can be loaded into a RISC complex and which direct the cleavage of another RNA molecule, wherein the other RNA molecule comprises a nucleotide sequence essentially complementary to the nucleotide sequence of the miRNA molecule.

[0189] Typically, a miRNA molecule is processed from a “pre-miRNA” or as used herein a precursor of a pre-miRNA molecule by proteins, such as DCL proteins, present in any plant cell and loaded onto a RISC complex where it can guide the cleavage of the target RNA molecules.

[0190] Pre-microRNA molecules are typically processed from pri-microRNA molecules (primary transcripts). The single stranded RNA segments flanking the pre-microRNA are important for processing of the pri-miRNA into the pre-miRNA. The cleavage site appears to be determined by the distance from the stem-ssRNA junction (Han et al. 2006, Cell 125, 887-901, 887-901).

[0191] As used herein, a “pre-miRNA” molecule is an RNA molecule of about 100 to about 200 nucleotides, preferably about 100 to about 130 nucleotides which can adopt a secondary structure comprising an imperfect double stranded RNA stem and a single stranded RNA loop (also referred to as “hairpin”) and further comprising the nucleotide sequence of the miRNA (and its complement sequence) in the double stranded RNA stem. According to a specific embodiment, the miRNA and its complement are located about 10 to about 20 nucleotides from the free ends of the miRNA double stranded RNA stem. The length and sequence of the single stranded loop region are not critical and may vary considerably, e.g. between 30 and 50 nucleotides in length. The complementarity between the miRNA and its complement need not be perfect and about 1 to 3 bulges of unpaired nucleotides can be tolerated. The secondary structure adopted by an RNA molecule can be predicted by computer algorithms conventional in the art such as mFOLD. The particular strand of the double stranded RNA stem from the pre-miRNA which is released by DCL activity and loaded onto the RISC complex is determined by the degree of complementarity at the 5′ end, whereby the strand which at its 5′ end is the least involved in hydrogen bonding between the nucleotides of the different strands of the cleaved dsRNA stem is loaded onto the RISC complex and will determine the sequence specificity of the target RNA molecule degradation. However, if empirically the miRNA molecule from a particular synthetic pre-miRNA molecule is not functional (because the “wrong” strand is loaded on the RISC complex), it will be immediately evident that this problem can be solved by exchanging the position of the miRNA molecule and its complement on the respective strands of the dsRNA stem of the pre-miRNA molecule. As is known in the art, bonding between A and U involving two hydrogen bonds, or G and U involving two hydrogen bonds is less strong that between G and C involving three hydrogen bonds.

[0192] Naturally occurring miRNA molecules may be comprised within their naturally occurring pre-miRNA molecules but they can also be introduced into existing pre-miRNA molecule scaffolds by exchanging the nucleotide sequence of the miRNA molecule normally processed from such existing pre-miRNA molecule for the nucleotide sequence of another miRNA of interest. The scaffold of the pre-miRNA can also be completely synthetic. Likewise, synthetic miRNA molecules may be comprised within, and processed from, existing pre-miRNA molecule scaffolds or synthetic pre-miRNA scaffolds. Some pre-miRNA scaffolds may be preferred over others for their efficiency to be correctly processed into the designed microRNAs, particularly when expressed as a chimeric gene wherein other DNA regions, such as untranslated leader sequences or transcription termination and polyadenylation regions are incorporated in the primary transcript in addition to the pre-microRNA.

[0193] In some embodiments, the nucleic acid agent is a hairpin RNA (hpRNA) interference or intron-containing hairpin RNA (ihpRNA) interference construct. Methods for gene silencing in plants using hairpin RNA vectors are well known in the art and considered efficient at inhibiting the gene expression in plants. See, for example, Waterhouse and Helliwell (2003) Nat. Rev. Genet. 4:29-38 and Yan et al, PLoS one (2012) 7:e38186.

[0194] For hpRNA silencing, the expression cassette is designed to express an RNA molecule that hybridizes with itself to form a hairpin structure that includes a single-stranded loop region and a base-paired stem. The base-paired stem region includes a sense sequence corresponding to all or part of the endogenous messenger RNA encoding the gene whose expression is to be inhibited, and an antisense sequence that is fully or partially complementary to the sense sequence. Thus, the base-paired stem region of the molecule generally determines the specificity of the RNA interference for silencing. hpRNA molecules are considered efficient at inhibiting and silencing gene expression, and the RNA interference they induce may be inherited by subsequent plant generations. Methods for using hpRNA interference to inhibit or silence the expression of genes are described, for example, in US Patent Publication No. 2010058490 to Waterhouse et al. A transient assay for the efficiency of hpRNA constructs to silence gene expression in vivo has been described by Panstruga et al. (2003) Mol. Biol. Rep. 30:135-150.

[0195] For ihpRNA, the silencing molecules have the same general structure as for hpRNA, but the RNA molecule additionally includes an intron that is capable of being spliced in the cell in which the ihpRNA is expressed. The use of an intron minimizes the loop size in the hairpin RNA molecule following splicing, and this increases the interference efficiency.

[0196] According to the present teachings, the dsRNA molecules may be naturally occurring or synthetic.

[0197] The dsRNA can be a mixture of long and short dsRNA molecules such as, dsRNA, siRNA, siRNA+dsRNA, siRNA+miRNA, hpRNA or a combination of same. According to a specific embodiment, the dsRNA is an siRNA (100%).

[0198] The dsRNA molecule is designed for specifically targeting a target gene of interest. It will be appreciated that the dsRNA can be used to down-regulate one or more target genes. If a number of target genes are targeted, a heterogenic composition which comprises a plurality of dsRNA molecules for targeting a number of target genes is used. Alternatively said plurality of dsRNA molecules are separately applied to the seeds (but not as a single composition). According to a specific embodiment, a number of distinct dsRNA molecules for a single target are used, which may be separately or simultaneously (i.e., co-formulation) applied.

[0199] According to an embodiment of the invention, the target gene is endogenous to the plant. Downregulating such a gene is typically important for conferring the plant with an improved, agricultural, horticultural, nutritional trait (“improvement” or an “increase” is further defined herein).

[0200] As used herein “endogenous” refers to a gene which expression (mRNA or protein) takes place in the plant. Typically, the endogenous gene is naturally expressed in the plant or originates from the plant. Thus, the plant may be a wild-type plant. However, the plant may also be a genetically modified plant (transgenic).

[0201] Downregulation of the target gene may be important for conferring improved one of—, or at least one of (e.g., two of— or more), biomass, vigor, yield, fruit quality, abiotic and/or biotic stress tolerance or improved nitrogen use efficiency.

[0202] In some embodiments, target genes for downregulation by the methods and nucleic acid agents of the present invention are plant pathogen resistance gene products which expression thereof is upregulated following infection of the plant with a plant pathogen, for example, the plant pathogen of the plant infection (e.g. Candidatus Liberibacter spp).

[0203] Exemplary target genes include, but are not limited to, genes for signaling cascade intermediates such as MAPK, jasmonic acid, salicylic acid and fatty acids, enzymes and proteins associated with ROS production, carbohydrate and energy metabolism, chloroplast- and photosynthesis related gene products and the like, sugar polymer biosynthesis and degradation, sugar transport and export, volatile hormone biosynthesis and degradation, carbohydrate transport, ‘R’ genes, which expression can be silenced to improve the yield, growth rate, vigor, biomass, fruit quality or stress tolerance of a plant when infected with a plant pathogen. Other examples of target genes which may be subject to modulation according to the present teachings are described herein.

[0204] In some embodiments, target genes include, but are not limited to genes for pathogen resistance response such as changes in Salicylic acid levels, changes in Jasmonic acid levels, changes in Gibberellic acid levels, changes in Auxin levels, changes in Cytokinin levels, changes in Ethylene levels, changes in ABA phyto-hormones levels, up-regulation of phyto-hormone-related genes, biosynthesis, deposition and degradation of callose, reactive oxygen species production, functional FLS2/BAK1 complex formation, protein-kinase pathway activation, phloem blockage, starch accumulation, starch accumulation in phloem parenchyma cells, polymer sieve formation, changes in carbohydrate metabolism, cambial activity aberrations, sucrose accumulation and carotenoid synthesis.

[0205] The target gene may comprise a nucleic acid sequence which is transcribed to an mRNA which codes for a polypeptide.

[0206] Alternatively, the target gene can be a non-coding gene such as a miRNA or a siRNA.

[0207] For example, in order to silence the expression of an mRNA of interest, synthesis of the dsRNA suitable for use with some embodiments of the invention can be selected as follows. First, the mRNA sequence is scanned including the 3 UTR and the 5′ UTR.

[0208] Second, the mRNA sequence is compared to an appropriate genomic database using any sequence alignment software, such as the BLAST software available from the NCBI server (wwwdotncbidotnlmdotnihdotgov/BLAST/). Putative regions in the mRNA sequence which exhibit significant homology to other coding sequences are filtered out.

[0209] Qualifying target sequences are selected as template for dsRNA synthesis. Preferred sequences are those that have as little homology to other genes in the genome to reduce an “off-target” effect.

[0210] It will be appreciated that the RNA silencing agent of some embodiments of the invention need not be limited to those molecules containing only RNA, but further encompasses chemically-modified nucleotides and non-nucleotides.

[0211] The dsRNA may be synthesized using any method known in the art, including either enzymatic syntheses or solid-phase syntheses. These are especially useful in the case of short polynucleotide sequences with or without modifications as explained above. Equipment and reagents for executing solid-phase synthesis are commercially available from, for example, Applied Biosystems. Any other means for such synthesis may also be employed; the actual synthesis of the oligonucleotides is well within the capabilities of one skilled in the art and can be accomplished via established methodologies as detailed in, for example: Sambrook, J. and Russell, D. W. (2001), “Molecular Cloning: A Laboratory Manual”; Ausubel, R. M. et al., eds. (1994, 1989), “Current Protocols in Molecular Biology,” Volumes I-III, John Wiley & Sons, Baltimore, Md.; Perbal, B. (1988), “A Practical Guide to Molecular Cloning,” John Wiley & Sons, New York; and Gait, M. J., ed. (1984), “Oligonucleotide Synthesis”; utilizing solid-phase chemistry, e.g. cyanoethyl phosphoramidite followed by deprotection, desalting, and purification by, for example, an automated trityl-on method or HPLC.

[0212] According to a specific embodiment, the nucleic acid agent is provided to the plant in a configuration devoid of a heterologous promoter for driving recombinant expression of the dsRNA (exogenous), rendering the nucleic acid molecule of the instant invention a naked molecule. The nucleic acid agent may still comprise modifications that may affect its stability and bioavailability (e.g., PNA).

[0213] The term “recombinant expression” refers to an expression from a nucleic acid construct.

[0214] As used herein “devoid of a heterologous promoter for driving expression of the dsRNA” means that the molecule doesn't include a cis-acting regulatory sequence (e.g., heterologous) transcribing the dsRNA. As used herein the term “heterologous” refers to exogenous, not-naturally occurring within a native cell of the plant (such as by position of integration, or being non-naturally found within the cell).

[0215] The nucleic acid agent can be further comprised within a nucleic acid construct comprising additional regulatory elements. Thus, according to some embodiments of aspects of the invention there is provided a nucleic acid construct comprising isolated nucleic acid agent comprising a nucleic acid sequence which specifically reduces the expression of at least one plant pathogen resistance gene product.

[0216] For transcription from a transgene in vivo or from an expression cassette, a regulatory region (e.g., promoter, enhancer, silencer, leader, intron and polyadenylation) may be used to modulate the transcription of the RNA strand (or strands). Therefore, in one embodiment, there is provided a nucleic acid construct comprising the nucleic acid agent. The nucleic acid construct can have polynucleotide sequences constructed to facilitate transcription of the RNA molecules of the present invention are operably linked to one or more promoter sequences functional in a host cell. The polynucleotide sequences may be placed under the control of an endogenous promoter normally present in the host genome. The polynucleotide sequences of the present invention, under the control of an operably linked promoter sequence, may further be flanked by additional sequences that advantageously affect its transcription and/or the stability of a resulting transcript. Such sequences are generally located upstream of the promoter and/or downstream of the 3 end of the expression construct. The term “operably linked”, as used in reference to a regulatory sequence and a structural nucleotide sequence, means that the regulatory sequence causes regulated expression of the linked structural nucleotide sequence. “Regulatory sequences” or “control elements” refer to nucleotide sequences located upstream, within, or downstream of a structural nucleotide sequence, and which influence the timing and level or amount of transcription, RNA processing or stability, or translation of the associated structural nucleotide sequence. Regulatory sequences may include promoters, translation leader sequences, introns, enhancers, stem-loop structures, repressor binding sequences, termination sequences, pausing sequences, polyadenylation recognition sequences, and the like. In some embodiments, the host is a plant, and promoter and other regulatory elements are active in plants.

[0217] The nucleic acid agent can be delivered to the plants in a variety of ways. As mentioned, nucleic acids can be introduced into plants by injection, aerosol application, dusting, in a dry flowable, an emulsifiable flowable, as a granule, in a microencapsulation, in a pellet, as a soluble powder, with an injuring agent, bombardment, by air-brush spraying, supplemented with a plant hormone, added to an agar-based germination platform, supplemented with a wetting agent, supplemented with polysaccharide such as sodium alginate or chitosan, supplemented with transfection reagents. In some non-limiting embodiments, the nucleic acid agent is formulated for application by irrigation, positive or negative pressure application. In other non-limiting embodiments, the nucleic acid agent is formulated for application along with a plant nutrition supplement, for example, a urea-triazone supplement, such as the commercially available urea-triazone N (N-SURE®, Tessenderlo-Kerley, Pheonix, Ariz.). Administration of the nucleic acid with such a urea-triazone supplement is suitable for both foliar and soil application in all plants, particularly for commercial vegetable and fruit crops. The nucleic acid agent can be provided to the plant as a nucleic acid, without additional agents (e.g. transfection agents) or encapsulation or other formulation, or, optionally, formulated with additional agents for example, for enhancing uptake or efficacious downregulation of the target gene products.

[0218] In some particular embodiments, the nucleic acid agent is introduced into the plant via injection into the plant or tree. Methods suitable for injection of nucleic acids and nucleic acid agents into the plant or tree are described, for example, in Utah State University Cooperative Extension's informational paper by Michael Kuhns (NR/FF/020), including trunk implantation (see for example, Acecaps™ and Medicaps™), pressurized and no-pressure trunk injection (see, for example, Arborjet Tree IV™ and Wedgle™, Tree Tech™ and Rainbow Tree Care™), soil injection and trunk basal spray.

[0219] In other embodiments, the nucleic acid agent is introduced into the plant using virus-induced gene silencing. Virus-induced gene silencing (VIGS) offers an attractive alternative to transgenic technology as it allows the investigation of gene functions without plant transformation (Ruiz et al., 1998; Burch-Smith et al., 2004). A partial fragment of a candidate gene is inserted into the virus vector to generate a recombinant virus. Infection (e.g. via Agrobacterium) of plants with this recombinant virus leads to the production of virus-related small interfering RNAs (siRNAs) (Baulcombe, 2004), which can mediate degradation of related endogenous gene transcripts, resulting in silencing of the candidate gene expression in inoculated plants (Brigneti et al., 2004; Burch-Smith et al., 2004). The silencing effect on endogenous gene expression can usually be assayed 1-2 weeks after virus inoculation. VIGS has become one of the most widely used and indeed important reverse genetics tools, especially for non-model plants. In some embodiments, candidate nucleic acid sequences for specifically reducing the expression of plant pathogen resistance gene products are screened in model infections and/or field conditions using VIGS.

[0220] VIGS can be used for silencing or reducing expression of candidate plant-pathogen related genes. Using viral vectors to silence an endogenous plant gene may involve cloning into the viral genome, without significantly compromising viral replication and movement, a nucleotide fragment sharing a certain percentage identity or complementarity to the endogenous plant gene. The principle and detailed protocol regarding the VIGS system have been described (Dinesh-Kumar, et al., (2003) Methods in Mol. Biol. 236:287-94; Lu, et al., (2003) Methods 30:296-303). Several different RNA and DNA plant viruses have been modified to serve as vectors for gene expression. These RNA viruses, such as TMV (tobacco mosaic virus), PVX (potato virus X), and TRV (tobacco rattle virus), can been used to silence many different target genes (Angell, et al., (1999) Plant J. 20:357-62; Kumagai, et al., (1995) PNAS 92:1679-83; MacFarlane, et al., (2000) Virology 267:29-35). Other suitable viruses for VIGs construction include, but are not limited to Citrus tristeza virus (CTV), apple latent spherical virus (ALSV), Barley stripe mosaic virus (BSMV), Satellite tobacco mosaic virus (STMV) and Anthoxanthum latent blanching virus (ALBV). Though DNA viruses, limited to Geminiviridae, have not been extensively used as expression vector, tomato golden mosaic virus (TGMV) and cabbage leaf curl virus (CaLCuV) have been used to generate silencing vectors and silenced both transgenes and native genes in tomato and Arabidopsis (Peele, et al., (2001) Plant J. 27:357-66; Turnage, et al., (2001) Plant J. 107:14). As is known to those skilled in the art, each virus/host combination should be optimized for producing effective silencing vectors. In the Examples provided herewith, the viral genome is provided as a bipartite virus. However, it is to be understood that other optimized vectors can be used and are included within the scope of the applicant's teachings. For example, the silencing vector may include the origin of to replication, the genes necessary for replication in a plant cell, and one or more nucleotide sequences with similarity to one or more target genes. The vector may also include those genes necessary for viral movement. In the case of bipartite viruses, for example geminiviruses, the A and B components may be carried in the same silencing vector. Alternatively, as in the case of TRV, the plant may be transformed with both components on separate vectors. In one example, the A genome component of a geminivirus (which replicates autonomously) was shown to be sufficient for VIGS, as was the B component (WO 01/94694 and US Patent Application Publication Number 2002/0148005, both of which are incorporated herein by reference). These references indicate that the A genome (AL1, AL2 and/or AL3) or the B genome (BR1 and/or BL1) may be used as a silencing vector. Other silencing vectors are disclosed in U.S. Pat. No. 6,759,571 and US Patent Application Publication Numbers 2004/0019930 and 20110016584, both of which are herein incorporated by reference. WO 01/94694 (incorporated herein by reference) discloses the locations of the geminivirus genome where the nucleotide sequences may be inserted. For example, the nucleotide sequence that is similar to at least a fragment of a target gene may replace any coding or non-coding region that is nonessential for the present purposes of gene silencing, may be inserted into the vector outside the viral sequences, or may be inserted just downstream of an endogenous viral gene, such that the viral gene and the nucleotide sequence are cotranscribed. For example, the nucleotide sequence may be inserted in the common region of the viral genome, however it is preferred that the nucleotide sequences not be inserted into or replace the Ori sequences or the flanking sequences that are required for viral DNA replication. The size of the nucleotide sequence that is similar to the target gene may depend on the site of insertion or replacement within the viral genome.

[0221] Thus, in some embodiments, the nucleic acid agent comprising a nucleic acid which specifically reduces the expression of at least one plant pathogen resistance gene product is comprised in a VIGS viral-induced gene silencing vector construct. In some embodiments, the VIGS vector construct is further comprised in a suitable bacterial host, for example, an Agrobacterium. In yet further embodiments, administering or providing the nucleic acid agent of the invention to the plant comprises introducing a VIGS vector comprising the nucleic acid agent into the cells of a host plant.

[0222] Expression comprises transcription of the heterologous DNA sequence into mRNA. Regulatory elements ensuring expression in eukaryotes are well known to those skilled in the art. In the case of eukaryotic cells, they comprise polyA signals ensuring termination of transcription and stabilization of the transcript. The polyA signals commonly used include that of the 35S RNA from CaMV and that of the nos gene from Agrobacterium. Other regulatory elements can include transcriptional and/or translational; enhancers, introns, and others as is known to those skilled in the art.

[0223] Any methods of inoculation or transformation may be used as is known to those skilled in the art. The delivery methods for VIGS constructs include but are not limited to, mechanical injection of in vitro transcribed RNA or extracts from infected plants, Agrobacterium (Agro)-inoculation, inoculation by gentle abrasion of the surfaces of the leaves with carborundum and plasmid DNA (“plasmid inoculation”), and microprojectile bombardment. Mechanical injection is time consuming but can increase the efficiency of silencing in certain hosts such as Arabidopsis (Ratcliff, et al., (2001) Plant J. 25:237-45). Agro-inoculation is the most popular and has been developed for both DNA and RNA viruses (Schob, et al., (1997) Mol. Gen. Genet. 256:581-85). Agro-inoculation is more feasible for large-scale production application and less time consuming. Tobacco, tomato, and barley VIGS vectors have been developed and shown extensive silencing using Agro-inoculation. Specifically, TRV-derived VIGS vector/Agro-inoculation is becoming the dominant combination for many investigators. Inoculation by gentle abrasion of the surfaces of the leaves with carborundum and plasmid DNA is described in Uhde, et al., (2005) Arch. Virol. 150:327-340. Microprojectile bombardment of plasmid DNA-coated tungsten or gold micron-sized particles has been extremely useful for DNA virus-based VIGS vector (Muangsan, et al., (2004) Plant J. 38:1004-14). Ryu, et al., (WO 2005/103267) describes a method of VIGS via agroinoculation by drenching roots of the plants in a suspension of Agrobacterium (Agrodrench).

[0224] Thus, according to some embodiments of the invention, there is provided a plant comprising at least one exogenous isolated nucleic acid agent comprising a nucleic acid which specifically reduces the expression of at least one plant pathogen resistance gene product selected from the group consisting of plant gene products having at least 60% identity to any of the polynucleotide sequences of Table II or Table III. The plant can be any one of a tree, a shrub, a bush, a seedling, a seed, a scion, rootstock, an inarched plant, a bud, a budwood, a root or a graft. In some particular embodiments the plant is a citrus or citrus-like plant selected from the group consisting of including sweet oranges commercial varieties (Citrus sinensis Osbeck (L.), clementines (C. reticulata), limes (C. aurantifolia), lemon (C. limon), sour orange (C. aurantium), hybrids and relatives (Citranges, Citrumelos, Citrandarins), Balsamocitrus dawei, C. maxima, C. jambhiri, Clausena indica, C. lansium, Triphasia trifolia, Swinglea glutinosa, Micromellum tephrocarpa, Merope spp., Eremolemon; Atalantia spp., Severinia buxifolia; Microcitrus spp., Fortunella spp., Calodendrum capense, Murraya spp., Poncirus trifoliate. In some embodiments, wherein the plant is a citrus or citrus-related plant, the at least one exogenous isolated nucleic acid agent comprises a nucleic acid which specifically reduces the expression of at least one plant pathogen resistance gene product selected from the group consisting of the polynucleotide sequences of Table IV. In some embodiments there is provided a cell of the plant comprising the at least one exogenous isolated nucleic acid agent. The cell can be a cell of any organ or tissue of the plant.

[0225] It will be appreciated that some non-citrus plants can also be hosts to Candidatus Liberibacter spp, such as the Solanacaea, for example, tomatoes and potatoes. Tomato has been known to contract C. Liberibacter infection both in the wild and under controlled, laboratory conditions. A non-limiting list of tomato sequences suitable for use with the compositions and methods of the present invention is provided in Table VI:

TABLE VI
SOME TOMATO PLANT PATHOGEN
RESPONSE GENE SEQUENCES
[SEQ ID NO. and GENE IDENTIFICATION (gi) NO.]

| | |
|---|---|
| 489 | 460374150 |
| 490 | 460395563 |
| 491 | 460365404 |
| 492 | 460365402 |
| 493 | 460381148 |
| 494 | 460366991 |
| 495 | 460397655 |
| 496 | 460408956 |
| 497 | 460395273 |
| 498 | 460407453 |
| 499 | 460389683 |
| 500 | 460388052 |
| 501 | 460404051 |
| 502 | 460368826 |
| 503 | 460414034 |
| 504 | 460368828 |
| 505 | 460383569 |
| 506 | 460388054 |
| 507 | 350535071 |
| 508 | 460377611 |
| 509 | 460397175 |
| 510 | 225321497 |
| 511 | 460388987 |
| 512 | 225319432 |
| 513 | 460397173 |
| 514 | 225321666 |
| 515 | 1654139 |
| 516 | 460379599 |

[0226] The isolated nucleic acid can be provided in an agrochemical composition. Thus, according to some embodiments, there is provided an agrochemical composition comprising an isolated nucleic acid sequence which specifically reduces the expression of at least one plant pathogen resistance gene product in a plant. As used herein, the phrase “agrochemical composition” is defined as a composition for agrochemical use, and, as further defined, the agrochemical composition comprises at least one agrochemically active substance. Thus, in addition to the isolated nucleic acid sequence, the agrochemical composition of the present invention can include additional plant-beneficial or agrochemically active compounds. Exemplary plant-beneficial or agrochemically active compounds include, but not are limited to fertilizers, antibiotics, biocides, pesticides, pest repellents, herbicides, plant hormones, bacteriocides such as copper and the like. In some particular embodiments, the agrochemical composition comprises plant hormones. As used herein, the term “plant hormone” is used to indicate a plant-generated signaling molecule that normally affects at least one aspect of plant development, including but not limited to, growth, seed development, flowering and root growth. One of skill in the art will readily understand the term plant hormone and what entities fall under the scope of this term. For example, plant hormones include but are not limited to, abscisic acid (ABA) or a derivative thereof, gibberellins (GA), auxins (IAA), ethylene, cytokinins (CK), brassinosteroids (BR), jasmonates (JA), salicylic acid (SA), strigolactones (SL). In select embodiments, the fusion proteins of the present invention comprise a plant hormone binding domain that binds abscisic acid (ABA), gibberellins (GA), auxins (IAA) and/or jasmonates (JA).

[0227] Further, the agrochemical composition can optionally comprise with one or more additives favoring optimal dispersion, atomization, deposition, leaf wetting, distribution, retardation of degradation by soil organisms and their secretion (for example, by addition of bacteriocides such as copper), retention and/or uptake of the agrochemical composition by the plant. As a non-limiting example such additives are diluents, solvents, adjuvants, surfactants, wetting agents, spreading agents, oils, stickers, thickeners, penetrants, buffering agents, acidifiers, anti-settling agents, anti-freeze agents, photo-protectors, defoaming agents, biocides and/or drift control agents.

[0228] The nucleic acid agents, compositions and agrochemical compositions of the present invention are suitable for agrochemical use. “Agrochemical use,” as used herein, not only includes the use of agrochemical compositions as defined above that are suitable and/or intended for use in field grown crops (e.g., agriculture), but also includes the use of agrochemical compositions that are meant for use in greenhouse grown crops (e.g., horticulture/floriculture) or hydroponic culture systems or uses in public or private green spaces (e.g., private gardens, parks, sports fields), for protecting plants or parts of plants, including but not limited to bulbs, tubers, fruits and seeds (e.g., from harmful organisms, diseases or pests), for controlling, preferably promoting or increasing, the growth of plants; and/or for promoting the yield of plants, or the parts of plants that are harvested (e.g., its fruits, flowers, seeds etc.).

[0229] “Agrochemical active substance,” as used herein, means any active substance or principle that may be used for agrochemical use, as defined above. Examples of such agrochemical active substances will be clear to the skilled person and may for example include compounds that are active as insecticides (e.g., contact insecticides or systemic insecticides, including insecticides for household use), acaricides, miticides, herbicides (e.g., contact herbicides or systemic herbicides, including herbicides for household use), fungicides (e.g., contact fungicides or systemic fungicides, including fungicides for household use), nematicides (e.g., contact nematicides or systemic nematicides, including nematicides for household use) and other pesticides (for example avicides, molluscicides, piscicides) or biocides (for example, agents for killing bacteria, algae or snails); as well as fertilizers; growth regulators such as plant hormones; micro-nutrients, safeners; pheromones; repellants; baits (e.g., insect baits or snail baits); and/or active principles that are used to modulate (i.e., increase, decrease, inhibit, enhance and/or trigger) gene expression (and/or other biological or biochemical processes) in or by the targeted plant (e.g., the plant to be protected or the plant to be controlled). Agrochemical active substances include chemicals, but also nucleic acids, peptides, polypeptides, proteins (including antigen-binding proteins) and micro-organisms. Examples of such agrochemical active substances will be clear to the skilled person; and for example include, without limitation: Diamides: chlorantraniliprole, cyantraniliprole, flubendiamide, tetronic and tetramic acid derivatives: spirodiclofen, spirotetramat, spiromisifen, modulators of chordotonal organs: pymetrozine, flonicamid; nicotinic acetylcholine receptor agonists: sulfoxaflor, flupyradifurone; spiroxamines, glyphosate, paraquat, metolachlor, acetochlor, mesotrione, 2,4-D,atrazine, glufosinate, sulfosate, fenoxaprop, pendimethalin, picloram, trifluralin, bromoxynil, clodinafop, fluoroxypyr, nicosulfuron, bensulfuron, imazetapyr, dicamba, imidacloprid, thiamethoxam, fipronil, chlorpyrifos, deltamethrin, lambda-cyhalotrin, endosulfan, methamidophos, carbofuran, clothianidin, cypermethrin, abamectin, diflufenican, spinosad, indoxacarb, bifenthrin, tefluthrin, azoxystrobin, thiamethoxam, tebuconazole, mancozeb, cyazofamid, fluazinam, pyraclostrobin, epoxiconazole, chlorothalonil, copper fungicides, trifloxystrobin, prothioconazole, difenoconazole, carbendazim, propiconazole, thiophanate, sulphur, boscalid and other known agrochemicals or any suitable combination(s) thereof. Other suitable agrochemicals will be clear to the skilled person based on the disclosure herein, and may for example be any commercially available agrochemical, and for example include each of the compounds listed in any of the websites of the Herbicide Resistance Action Committee, Fungicide Resistance Action Committee and Insecticide Resistance Action Committee, as well as those listed in Phillips McDougall, AgriService November 2007 V4.0, Products Section—2006 Market, Product Index pp. 10-20. The agrochemical active substances can occur in different forms, including but not limited to, as crystals, as micro-crystals, as nano-crystals, as co-crystals, as a dust, as granules, as a powder, as tablets, as a gel, as a soluble concentrate, as an emulsion, as an emulsifiable concentrate, as a suspension, as a suspension concentrate, as a suspoemulsion, as a dispersion, as a dispersion concentrate, as a microcapsule suspension or as any other form or type of agrochemical formulation clear to those skilled in the art. Agrochemical active substances not only include active substances or principles that are ready to use, but also precursors in an inactive form, which may be activated by outside factors. As a non limiting example, the precursor can be activated by pH changes, caused by plant wounds upon insect damage, by enzymatic action caused by fungal attack, or by temperature changes or changes in humidity.

[0230] The agrochemical composition hereof may be in a liquid, semi-solid or solid form and for example be maintained as an aerosol, flowable powder, wettable powder, wettable granule, emulsifiable concentrate, suspension concentrate, microemulsion, capsule suspension, dry microcapsule, tablet or gel or be suspended, dispersed, emulsified or otherwise brought in a suitable liquid medium (such as water or another suitable aqueous, organic or oily medium) for storage or application. Optionally, the composition further comprises one or more further components such as, but not limited to diluents, solvents, adjuvants, surfactants, wetting agents, spreading agents, oils, stickers, thickeners, penetrants, buffering agents, acidifiers, anti-settling agents, anti-freeze agents, photo-protectors, defoaming agents, biocides and/or drift control agents or the like, suitable for use in the composition hereof.

[0231] According to some aspects of the present invention there is also provided a method for manufacturing an agrochemical composition, the method comprising (i) selecting at least one, preferably more, nucleic acid sequence which specifically reduces the expression of at least one plant pathogen resistance gene product in a plant (e.g. dsRNA), and (ii) formulating the nucleic acid agent in a compound with additional substance or substances, such as an agrochemical active substance, or a combination of compounds, and optionally (iii) adding further components that may be suitable for such compositions, preferably for agrochemical compositions. In some embodiments, the compound is comprised in a carrier.

[0232] The method of the present invention comprises at least one application of a composition hereof to the plant or to plant parts.

[0233] If needed, the composition is dissolved, suspended and/or diluted in a suitable solution before use. The application to the plant or plant parts is carried out using any suitable or desired manual or mechanical technique for application of an agrochemical composition, including but not limited to spraying, brushing, dressing, dripping, dipping, coating, spreading, applying as small droplets, a mist or an aerosol. “Increasing yield, growth rate, vigor, biomass, fruit quality or stress tolerance of a plant when infected by a plant pathogen” as used herein, is the protection of the plant against damage or yield decrease, caused by the plant pathogen infection (as defined earlier). Thus, in addition to the action on the plant pathogen response, the composition hereof can have an insecticidal or an antibiotic or insecticidal activity, helping to combat damage, —and as such prevent yield losses—caused by plant pathogenic organisms.

[0234] In some embodiments, the dsRNA or compositions of the invention will be provided to the plant by injection.

[0235] Exemplary concentrations of dsRNA in the composition include, but are not limited to, 0.01-0.3 ug/ul, 0.01-0.15 ug/ul, 0.04-0.15 ug/ul, 0.1-100 ug/u1; 0.1-50 ug/ul, 0.1-10 ug/ul, 0.1-5 ug/ul, 0.1-1 ug/ul, 0.1-0.5 ug/ul, 0.15-0.5 ug/ul, 0.1-0.3 ug/ul, 0.01-0.1 ug/ul, 0.01-0.05 ug/ul, 0.02-0.04 ug/ul, 0.001-0.02 ug/ul. According to further embodiments, the concentration of dsRNA in the treating solution includes, but is not limited to, 0.01-0.3 ng/ul, 0.01-0.15 ng/ul, 0.04-0.15 ng/ul, 0.1-100 ng/u1; 0.1-50 ng/ul, 0.1-10 ng/ul, 0.1-5 ng/ul, 0.1-1 ng/ul, 0.1-0.5 ng/ul, 0.15-0.5 ng/ul, 0.1-0.3 ng/ul, 0.01-0.1 ng/ul, 0.01-0.05 ng/ul, 0.02-0.04 ng/ul, 0.001-0.02 ng/ul. According to a specific embodiment, the concentration of the dsRNA in the treating solution is 0.1-1 ug/ul. According to some embodiments, the nucleic acid agent is provided in amounts effective to reduce or suppress expression of at least one plant pathogen resistance gene product. As used herein “a suppressive amount” or “an effective amount” refers to an amount of dsRNA which is sufficient to down regulate (reduce expression of) the target gene by at least 20%, 30%, 40%, 50%, or more, say 60%, 70%, 80%, 90% or more even 100%.

[0236] According to some embodiments of the present invention, the concentration of dsRNA is provided to the plant in effective amounts, measured in mass/kg plant. Such effective amounts include, but are not limited to, 0.001-0.003 mg/kg, 0.005-0.015 mg/kg, 0.01-0.15 mg/kg, 0.1-100 mg/kg; 0.1-50 mg/kg, 0.1-10 mg/kg, 0.1-5 mg/kg, 0.1-1 mg/kg, 0.1-0.5 mg/kg, 0.15-0.5 mg/kg, 0.1-0.3 mg/kg, 0.01-0.1 mg/kg, 0.01-0.05 mg/kg, 0.02-0.04 mg/kg, 0.001-0.02 mg/kg, 0.001-0.003 g/kg, 0.005-0.015 g/kg, 0.01-0.15 g/kg, 0.1-100 g/kg; 0.1-50 g/kg, 0.1-10 g/kg, 0.1-5 g/kg, 0.1-1 g/kg, 0.1-0.5 g/kg, 0.15-0.5 g/kg, 0.1-0.3 g/kg, 0.01-0.1 g/kg, 0.01-0.05 g/kg, 0.02-0.04 g/kg, 0.001-0.02 g/kg plant. According to a specific embodiment, the effective amount of the dsRNA provided to the plant is 0.0001-10000 mg/kg plant. In another embodiment, the effective amount is 1-1000 mg/kg plant.

[0237] Reagents of the present invention can be packed in a kit including the nucleic acid agent (e.g. dsRNA), instructions for introducing the nucleic acid agent, construct or composition into the plants and optionally an agrochemically active agent.

[0238] Compositions of some embodiments of the invention may, if desired, be presented in a pack or dispenser device, which may contain one or more dosage forms containing the active ingredient. The pack may, for example, comprise metal or plastic foil, such as a blister pack. The pack or dispenser device may be accompanied by instructions for introduction to the plant.

[0239] According to an exemplary embodiment, the nucleic acid agent, or composition and additives are comprised in separate containers.

[0240] As used herein the term “about” refers to ±10%.

[0241] The terms “comprises”, “comprising”, “includes”, “including”, “having” and their conjugates mean “including but not limited to”.

[0242] The term “consisting of” means “including and limited to”.

[0243] The term “consisting essentially of” means that the composition, method or structure may include additional ingredients, steps and/or parts, but only if the additional ingredients, steps and/or parts do not materially alter the basic and novel characteristics of the claimed composition, method or structure.

[0244] As used herein, the singular form “a”, “an” and “the” include plural references unless the context clearly dictates otherwise. For example, the term “a compound” or “at least one compound” may include a plurality of compounds, including mixtures thereof.

[0245] Throughout this application, various embodiments of this invention may be presented in a range format. It should be understood that the description in range format is merely for convenience and brevity and should not be construed as an inflexible limitation on the scope of the invention. Accordingly, the description of a range should be considered to have specifically disclosed all the possible subranges as well as individual numerical values within that range. For example, description of a range such as from 1 to 6 should be considered to have specifically disclosed subranges such as from 1 to 3, from 1 to 4, from 1 to 5, from 2 to 4, from 2 to 6, from 3 to 6 etc., as well as individual numbers within that range, for example, 1, 2, 3, 4, 5, and 6. This applies regardless of the breadth of the range.

[0246] Whenever a numerical range is indicated herein, it is meant to include any cited numeral (fractional or integral) within the indicated range. The phrases “ranging/ranges between” a first indicate number and a second indicate number and “ranging/ranges from” a first indicate number “to” a second indicate number are used herein interchangeably and are meant to include the first and second indicated numbers and all the fractional and integral numerals therebetween.

[0247] As used herein the term “method” refers to manners, means, techniques and procedures for accomplishing a given task including, but not limited to, those manners, means, techniques and procedures either known to, or readily developed from known manners, means, techniques and procedures by practitioners of the chemical, pharmacological, biological, biochemical and medical arts.

[0248] It is appreciated that certain features of the invention, which are, for clarity, described in the context of separate embodiments, may also be provided in combination in a single embodiment. Conversely, various features of the invention, which are, for brevity, described in the context of a single embodiment, may also be provided separately or in any suitable subcombination or as suitable in any other described embodiment of the invention. Certain features described in the context of various embodiments are not to be considered essential features of those embodiments, unless the embodiment is inoperative without those elements.

[0249] Various embodiments and aspects of the present invention as delineated hereinabove and as claimed in the claims section below find experimental support in the following examples.

### EXAMPLES

[0250] Reference is now made to the following examples, which together with the above descriptions, illustrate the invention in a non limiting fashion.

[0251] Generally, the nomenclature used herein and the laboratory procedures utilized in the present invention include molecular, biochemical, microbiological and recombinant DNA techniques. Such techniques are thoroughly explained in the literature. See, for example, “Molecular Cloning: A laboratory Manual” Sambrook et al., (1989); “Current Protocols in Molecular Biology” Volumes I-III Ausubel, R. M., ed. (1994); Ausubel et al., “Current Protocols in Molecular Biology”, John Wiley and Sons, Baltimore, Md. (1989); Perbal, “A Practical Guide to Molecular Cloning”, John Wiley & Sons, New York (1988); Watson et al., “Recombinant DNA”, Scientific American Books, New York; Birren et al. (eds) “Genome Analysis: A Laboratory Manual Series”, Vols. 1-4, Cold Spring Harbor Laboratory Press, New York (1998); methodologies as set forth in U.S. Pat. Nos. 4,666,828; 4,683,202; 4,801,531; 5,192,659 and 5,272,057; “Cell Biology: A Laboratory Handbook”, Volumes I-III Cellis, J. E., ed. (1994); “Culture of Animal Cells—A Manual of Basic Technique” by Freshney, Wiley-Liss, N. Y. (1994), Third Edition; “Current Protocols in Immunology” Volumes I-III Coligan J. E., ed. (1994); Stites et al. (eds), “Basic and Clinical Immunology” (8th Edition), Appleton & Lange, Norwalk, Conn. (1994); Mishell and Shiigi (eds), “Selected Methods in Cellular Immunology”, W. H. Freeman and Co., New York (1980); available immunoassays are extensively described in the patent and scientific literature, see, for example, U.S. Pat. Nos. 3,791,932; 3,839,153; 3,850,752; 3,850,578; 3,853,987; 3,867,517; 3,879,262; 3,901,654; 3,935,074; 3,984,533; 3,996,345; 4,034,074; 4,098,876; 4,879,219; 5,011,771 and 5,281,521; “Oligonucleotide Synthesis” Gait, M. J., ed. (1984); “Nucleic Acid Hybridization” Hames, B. D., and Higgins S. J., eds. (1985); “Transcription and Translation” Hames, B. D., and Higgins S. J., eds. (1984); “Animal Cell Culture” Freshney, R. I., ed. (1986); “Immobilized Cells and Enzymes” IRL Press, (1986); “A Practical Guide to Molecular Cloning” Perbal, B., (1984) and “Methods in Enzymology” Vol. 1-317, Academic Press; “PCR Protocols: A Guide To Methods And Applications”, Academic Press, San Diego, Calif. (1990); Marshak et al., “Strategies for Protein Purification and Characterization—A Laboratory Course Manual” CSHL Press (1996); all of which are incorporated by reference as if fully set forth herein. Other general references are provided throughout this document. The procedures therein are believed to be well known in the art and are provided for the convenience of the reader. All the information contained therein is incorporated herein by reference.

[0252] General Materials and Experimental Procedures

[0253] Gene Target Selection

[0254] Target plant resistance response genes are selected according to reported microarray and RNAseq experiments, for example, Tables II, IV and IV(a). Genes from different functional categories are targeted, such as: changes in Salicylic acid levels, changes in Jasmonic acid levels, changes in Gibberellic acid levels, changes in Auxin levels, changes in Cytokinin levels, changes in Ethylene levels, changes in ABA phyto-hormones levels, up-regulation of phyto-hormone-related genes, biosynthesis, deposition and degradation of callose, reactive oxygen species production, functional FLS2/BAK1 complex formation, protein-kinase pathway activation, phloem blockage, starch accumulation, starch accumulation in phloem parenchyma cells, polymer sieve formation, changes in carbohydrate metabolism, cambial activity aberrations, sucrose accumulation and carotenoid synthesis. The specific sequence for targeting is selected according to siRNA analysis available on-line, such as http://www(dot)med(dot)nagoya-u(dot)ac(dot)jp/neurogenetics/i_Score/i_score(dot)html. The selected sequences are ordered synthetically and serve as template for in vitro reverse transcription reaction.

[0255] For example, genes and sequences such as those in Table III, and homologues thereof, are selected for targeting and dsRNA targeting them is generated as described below.

[0256] Bioassay

[0257] Tomato plants are susceptible to C. Liberibacter psyllaurous infection via the psyllid B. cockerelli. Thus, tomato plants constitute a model species for assessing the efficacy of compositions and methods for enhancing fitness of HLB-infected plants.

[0258] dsRNA, generated as described above, comprising sequences of selected target tomato genes associated with plant pathogen resistance response is introduced into uninfected tomato plants by dusting, spraying, irrigation, injection or other effective means of delivering the dsRNA to the plant. Exemplary target genes from tomato are detailed in Table VI.

[0259] Presence of the dsRNA in the tomato plant tissues and organs is monitored by PCR, gel electrophoresis dot blotting or other typical detection technique, and effective means of delivery are selected. Persistence and integrity of the dsRNA is monitored periodically.

[0260] RNA extractions and cDNA syntheses are performed. The cDNA from each replicate treatment is then used to assess the amount and integrity of RNAi by measuring levels of gene expression using qRT-PCR. Reactions are performed in triplicate and compared to an internal reference to compare levels of RNAi. Tomato plants with decreased levels of a tested gene are further grown and experimentally infected with HLB.

[0261] Both control and dsRNA-bearing tomato plants are infected with C. Liberibacter psyllaurous (also known as “Lso”) by contacting with infected psyllid or grafting of infected shoots onto tomato rootstock. C. Liberibacter infection is identified by visual inspection for characteristic yellowing, mottling, spotting, leaf curling, stiffness, springiness, purpling, stunting, growth, fruiting etc. and verified by PCR for C. Liberibacter-specific markers.

[0262] Fitness of the control and treated tomato plants is assayed according to fruit quality, fruit drop and visual inspection. dsRNA, expression of targeted genes and severity of C. Liberibacter infection are also monitored, in order to assess the correlation between the extent of downregulation of the targeted gene expression, the severity of the disease and the fitness of the treated plants, compared with untreated or sham treated controls.

[0263] The present inventors contemplate that introducing dsRNA targeted to tomato plant pathogen resistance response genes into the tomato plants will enhance their fitness and fruit quality following C. Liberibacter (e.g. Lso) infection by attenuating the severity of plant response to infection and preventing or alleviating other adverse effects of plant pathogen resistance response on the infected plant.

[0264] Candidate pathogen resistance response genes whose downregulation proves effective in enhancing fitness and fruit quality can serve as valid targets for dsRNA silencing studies in other HLB-susceptible plant species, such as Citrus.

### Example 1

### Screening for Tomato Cultivar Compatibility with Psyllids Yellows (Lso) Disease and with Tobacco Rattle Virus (TRV)-Mediated Virus-Induced Gene Silencing

[0265] In order to select tomato cultivars suitable for modeling HBL disease, and the attenuation thereof by gene silencing, expression of the phytoene desaturase (PDS) gene was targeted by viral-induced gene silencing (VIGS), using a tomato rattle virus (TRV) vector and Agrobacterium transformation. Plants exhibiting photobleaching and strong, uniform gene silencing were selected as candidates for infection via psyllid rearing.

[0266] Cultivars

[0267] Tomato cultivars having a variety of different characteristics were chosen, including open-pollinating-early maturation cultivars (Gold Nugget, Yellow Pear, Early Cascade), open pollination-late maturation cultivars (Manitoba, Prudens Purple, Red Zebra), hybrid-early maturation cultivars (Juliet, Tiny Tim) and Hybrid-Late Maturation cultivars (Big Beef and Celebrity).

[0268] Gene silencing Seeds were germinated in water-saturated germination soil mixture in germination cones, cones covered to exclude light and incubated for 48-72 hours at 23-26 degrees C., then transferred to 16/8 light/dark cycle. Seedlings appeared typically after 5 days. The seedlings were then grown to the four true leaf stage (approximately 3 weeks post germination).

[0269] Agrobacterium containing constructs pTRV1, pTRV2-Empty Vector (no PDS sequence) and pTRV2-PDS were grown in LB medium+antibiotics overnight, pelleted and resuspended in inoculation medium (10 mM MES, 10 mM MgCl, 250 uM acetosyringone), and OD₆₀₀ measured. pTRV2-PDS contains the tomato phytoene desaturase sequence SEQ ID NO: 520. SEQ ID NO: 519 is the complete tomato PDS sequence. Agrobacterium cultures were mixed 1:1 just prior to infiltration of the plants by spray inoculation. TRV is a bipartite virus and, as such, two different A. tumefaciens strains are used for VIGS—one carrying pTRV1, which encodes the replication and movement viral functions while the other, pTRV2, harbors the coat protein and the plant endogenous sequence used for VIGS. Inoculation of the tomato seedlings with a mixture of both strains results in gene silencing.

[0270] Seedlings grown to four-true-leaf stage were inoculated with the transformed Agrobacterium, and grown for another 20 days, and observed for appearance of photo-bleaching (indicating PDS silencing). In order to monitor the levels of target mRNA in the inoculated plants, quantitative PCR analysis was performed on the RNA extracted from homogenized plant material samples, following synthesis of cDNA copies using reverse transcriptase.

[0271] Infection of Plants with Lso Via Psyllids

[0272] In order to expose the plants to the Lso bacterial pathogen, lower leaves of test plants are covered with an organza bag, one end of which is closed on the leaf, psyllids introduced into the bag (e.g. 15 adult psyllids per treatment) from the other opening and the bag drawn closed to prevent psyllid migration. Test and matching control plants (no psyllids) were returned to normal photoperiod for 72 hours, in order to allow psyllids to feed on the leaves. At 72 hours, the treated leaf (and corresponding control plant leaves) was removed and bag discarded.

[0273] Nucleic Acid Extraction

[0274] DNA was extracted using cetyl trimethyl ammonium bromide (CTAB) buffer. Extraction of RNA alone was performed using TRI® reagent extraction with DNase treatment to remove DNA.

[0275] Results

[0276] Three cultivars were highly compatible with VIGS silencing (FIG. 1)—Tiny Tim, Microtom and Manitoba. Silencing by infected psyllid rearing in these cultivars resulted in 100% bleaching, indicating 100% silencing rate among tested plants. Moreover, the effect of TRV alone, as judged by the detrimental effect of TRV empty vector (EV), was the least significant.

[0277] All the rest of the examined cultivars were deemed incompatible for one of the following reasons: 1. The TRV infection resulted in severe stunting of the plants 2. The photo bleaching appeared at low rates 3. The photo bleaching was very weak and patchy.

[0278] Leaves were picked and processed to determine whether the PDS gene silencing is exclusive to the photo bleaching phenotype. Both green and white leaves were analyzed. The results in FIG. 2 indicate that the white leaf phenotype (PDS white) fully correlated with effective silencing.

[0279] Among the three cultivars that exhibited satisfactory gene silencing, only one was compatible with Lso infection via infected psyllid rearing. Tiny Tim infection resulted in fast progression of disease symptomology. Within 3 weeks post infection, the infected plants were visibly distinguishable from the non-infected plants. FIG. 3 depicts the disease etiology along an 80 day time course. FIGS. 4 and 5 depict the differences between infected and non-infected plants in terms of plant height and number of flowers, respectively.

[0280] The presence of actual infection of the psyllid reared tomato plants with the Lso bacterial pathogen was confirmed by PCR using either of two nucleic acid extraction protocols, one in which DNA is extracted, and another extracting RNA. Samples from infected and control plants were assayed for the presence of the Lso 16s ribosomal sequence (SEQ ID NO: 521), using the following primers:

OA2 (also known as CP_P97)

| | |
|---|---|
| GCGCTTATTTTTTAATAGGAGCGGCA | (SEQ ID NO: 522) |

O12C (also known as CP_P98)

| | |
|---|---|
| GCCTCGCGACTTCGCAACCCAT. | (SEQ ID NO: 523) |

Internal control of the PCR was provided by measuring the presence of tomato actin sequences. Tomato actin primers used were:

ACTIN-LIKE7_F Actin2 qRT F (Also known as CP_P23):

| | |
|---|---|
| TTGCTGACCGTATGAGCAAG | (SEQ ID NO: 525) |

ACTINLIKE7_R Actin2 qRT R (Also known as CP_P24)

| | |
|---|---|
| GGACAATGGATGGACCAGAC | (SEQ ID NO: 526) |
| Tomato actin amplicon | (SEQ ID NO: 524) |
| is 291 bases in length. | |

[0281] Plant tissue harvested from plants infected via psyllid rearing exhibited clear disease signs at 6 weeks post infection. The non-infected plants (‘mock’ treatment in which an empty ‘organza bag’ was applied similarly followed by snipping of the petiole) showed no signs of the disease (FIG. 6, lanes N1 and N2). The presence of the PCR product that corresponds to the expected size of Lso 16S was detected only in plants that were infected by psyllid rearing (FIG. 6, lanes 19, 22, 23 and 24).

[0282] When cDNA was used as template for Lso detection, the detection was in agreement with the severity of disease signs (FIG. 7). The intense bands (Lanes 1, 2, 3, 4, 5 (faint) 101, 105, 11, 12, 14 and 15) corresponded to plants with stronger disease signs. Lower bands are tomato actin (housekeeping gene) controls.

### Example II

### Gene Silencing of Endogenous Tomato Genes Mink Virus-Induced Gene Silencing (VIGS)

[0283] Once tomato cultivars suitable for both gene silencing and Lso infection were identified, and infection with the bacterial pathogens confirmed, actual gene silencing of candidate genes was undertaken.

[0284] Tiny Tim tomato plants, grown from seed as described above, were agro-infiltrated with Agrobacterium bacterial culture harboring TRV plasmids as described above, using a 1 ml needleless syringe. Targets for gene silencing included genes corresponding to those differentially expressed in HLB infection in citrus:

TABLE VII
Gene Silencing Targets in tomatoes.

| | SEQ ID | | PRIMERS | |
|---|---|---|---|---|
| | | Full | (SEQ ID NOs) | |
| GENE | Target | Sequence | Forward | Reverse |
| AGPase (NCBI | 528 | 527 | 541 | 542 |
| NM_001246989.1) | | | | |
| GPT (NCBI | 530 | 529 | 547 | 548 |
| XM_004240097.2) | | | | |
| Callose Synthase | 532 | 531 | 539 | 540 |
| (NCBI XM_004232827.2) | | | | |
| Lipoxygenase | 534 | 533 | 549 | 550 |
| (GenBank U37840.1) | | | | |
| MYB transcriptional | 536 | 535 | 543 | 544 |
| regulator homologue | | | | |
| (NCBI XM_004249199.2) | | | | |
| PP2-B-15 | 538 | 537 | 545 | 546 |
| (NCBI XM_004230217.1) | | | | |

[0285] After ligation and transformation into E. coli cells, colony PCR and sequencing were conducted to verify the identity and integrity of each clone (FIG. 8). In FIG. 8, the different sizes of the amplified sequences correspond to the expected lengths of the targets. MCS (multiple cloning site, equivalent to Empty Vector EV) was used as a background control. pTRV1 (plasmid with remaining portion of the TRV genome) produced no amplification.

[0286] After agro-infiltration, the plants were kept at 22° C.+/−1 for an additional 22 days before harvesting plant tissue. RNA was extracted and mRNA levels were measured for each gene similarly to the procedure described in Example I.

### Results:

[0287] Silencing, to varying degrees, of tomato plant genes is illustrated in FIG. 9. Interestingly, the silencing ratio (the fold decrease of a transcript level in comparison to the empty vector control) was inversely proportional to the basal expression level [the difference (delta) in Ct (cycle threshold—cycle number at which PCR products become detectable) value from the normalizing gene that was used in the qPCR (Actin)] (FIG. 9).

[0288] Small RNA Deep Sequencing of Silenced Tomato Plants

[0289] Small RNA associated with gene silencing were mapped to identify abundant small RNA species, and map the small RNA distribution along the genes.

[0290] RNA was extracted from silenced and control (EV) plants using the MirVana small RNA kit, according to the manufacturer's protocol, and a library representing the population of small RNA fragments (200 bases or fewer) was prepared. The RNA was sequenced, reads smaller than 18 bases were discarded, and siRNA was quantified in the samples either by alignment to the plant genes silencing targets, or by quantification without alignment to the genome and comparison to tomato mature or stem-and-loop miRNA databases.

[0291] FIG. 10 is a table summarizing mapping of small RNAs against each of the silenced genes, showing that the small RNAs map exclusively to the gene silenced, in each of the silenced genes. Analysis of the read abundance across the sequence of the targeted genes revealed that no significant read abundance was detected outside the “silencing region” for each of the genes assayed.

### Example III

### Differential Gene Expression Resulting from Lso Infection in Tomatoes

[0292] The transcriptional response of tomato plants to Lso infection was analyzed, in order to identify potential targets for prevention or mitigation of disease symptomology by gene silencing. Expression profiles were generated at one week prior to developing clear symptoms, i.e. when unequivocal differences start to emerge between the infected and non-infected plants, in an effort to identify genes that are likely to be critical to disease symptomology.

[0293] Disease Sign Index

[0294] Lso disease severity in tomato plants was assessed visually according to phenotype, by blinded comparison with a standardized disease sign chart (See FIG. 11). The parameters observed include stunting, leaf curling, stiffness and springiness of the leaves, appearance of purple/purplish color, growth and fruiting. “0” DSI is a healthy plant, while a DSI of “4” is considered a severely diseased plant.

[0295] In order to prepare an expression profile, 110 Tiny Tim tomato plants were germinated simultaneously. After 15 days, 55 of them were infected via infected psyllid rearing, as described above. The remaining plants were defined as controls, for which a petiole was snipped similarly to the infected plants. At each week post infection, leaf samples were taken in duplicates from 5 infected plants and from 5 control plants, for 8 weeks. Each plant was sampled only once to prevent gene expression changes that result from the sampling itself (injury). All plants were monitored for disease signs according to the DSI (Disease Sign Index) (FIG. 11).

[0296] A sample that was taken from a plant that exhibited a DSI level of 1, at one week post sampling was defined as a pre-symptomatic sample. Three such samples were defined, and accordingly three controls plants were paired. RNA was extracted with Trizol (according to above protocol) and verified for high quality by gel electrophoresis and measurement of 230 nm/260 nm and 260 nm/280 nm absorbance ratios (inclusion—at least 2). To verify Lso infection, cDNA prepared from these extractions was used as template for the Lso detection PCR protocol, as described above.

[0297] Results

[0298] All the three infected plants were positive for Lso infection, while the controls were negative (results not shown). Samples were subjected to microarray analysis using a tomato gene chip (2.0 by Affymetrix). Candidate genes were identified according to the abovementioned criteria, and selected for further investigation as silencing targets.

### Example IV

### Experimental HLB Disease in Citrus Trees

[0299] In order to establish a disease model for experiments in a “laboratory”-controlled environment, and in order to synchronize the infections, HLB was introduced into the trees via grafting. The grafted trees can also be used as a template for studying differential gene expression along time.

[0300] Grafting Procedure:

[0301] Currently, each experiment consists of between 30 to 50 infected plants and an equivalent number of graft controls. The infected trees are roughly six months old and belong to the cultivar ‘sweet orange Valencia’ grafted on top of ‘Swingle’ rootstock.

[0302] Infection is conducted by grafting two budwoods from different sources onto a tree's stem. The source of grafting material (the budwood) is from infected trees that have been identified as highly symptomatic trees. The ‘graft control’ trees are self-grafted, i.e. a budwood is removed from a tree and grafted again onto the same tree, in order to rule out gene differential expression that results from the injury involved in grafting (FIG. 12).

[0303] A modified protocol for the “chip budding graft”, where usually, a bud is taken from one plant and inserted onto another, has been used. As the purpose of the graft here is just to connect vascular tissues and not for vegetative propagation, the scions cut to be used do not need any bud.

[0304] Exemplary Grafting Protocol:

[0305] 1. With a scalpel, make a 45° angled cut to a quarter of the distance through the rootstock, a young non-lignified stem from a healthy Citrus sp. Four centimeters above the first cut, make a second downward and inward cut until it meets the first cut to create a small notch and remove the chunk of bark;

[0306] 2. With a scalpel, cut a piece of the scion, a stem of the HLB infected Citrus sp., in a root-apical direction, with the same size of the chunk cut of the rootstock. This scion should have the same caliber of the rootstock's stem cut;

[0307] 3. Insert the stem infected with HLB cut (scion) into the cut of the healthy plant's stem (rootstock), reassuring that both stems are in the same vascular flow direction (root-apical);

[0308] 4. Wrap the region with a plastic strip as tight as possible;

[0309] 5. After forty days take the plastic strip off, if the infected stem died, there is a high possibility that the bacteria failed to transmit in the healthy tissue, therefore discard the tree;

[0310] 6. If the grafting succeeded (the infected stem is still alive), after two months, the grafted plant can be tested (from a leaf sample above the graft) by PCR reaction to evaluate success of infection;

[0311] 7. Monitor growth effects, symptoms should appear from 4 months;

[0312] Control Group:

[0313] To produce a control plant, use the same procedure described above, but performing only with healthy plants (no infected scions).

[0314] HLB Detection by Conventional PCR.

[0315] In order to assess the success rate of huanglongbing (HLB) infection of grafted citrus plants and to confirm that control plants are free of these bacteria, HLB specific DNA can be detected by conventional PCR.

[0316] DNA is extracted from citrus similarly to the DNA extraction protocol described above for tomato.

[0317] To detect the presence or absence of Ca. L. asiaticus, Ca. L. africanus and Ca. L. americanus in citrus plants, a duplex PCR is performed using bacterial-specific primers, for example, targeting the β—operon ribosomal protein gene of Ca. L. asiaticus and Ca. L. africanus and the 16S rDNA of Ca. L. americanus.

[0318] Exemplary Primers for PCT Detection of HLB Infection:

Ca. L. americanus:

(SEQ ID NO: 715)

| | |
|---|---|
| GB1-forward primer: | AAGTCGAGCGAGTACGCAAGTACT |

(SEQ ID NO: 716)

| | |
|---|---|
| GB3-reverse primer: | CCAACTTAATGATGGCAAATATAG |

Ca. L. asiaticus and Ca. L. africanus:

(SEQ ID NO: 717)

| | |
|---|---|
| A2-forward primer: | TATAAGGTTGACCTTTCGAGTTT |

(SEQ ID NO: 718)

| | |
|---|---|
| J5-reverse primer: | ACAAAAGCAGAAATAGCACGAACAA |

[0319] Additional Primers:

(SEQ ID NO: 719)

| | |
|---|---|
| CaLas PGK_RT_L3 forward | CAATCGTGGGAGGCTCTAAG |

(SEQ ID NO: 720)

| | |
|---|---|
| CaLas PGK_RT_R3 reverse | CCATGCCCTGTGCTACTAA |

(SEQ ID NO: 589)

| | |
|---|---|
| Citrus 18S forward | GCTTAGGCCAAGGAAGTTTG |

(SEQ ID NO: 590)

| | |
|---|---|
| Citrus 18S reverse | TCTATCCCCATCACGATGAA |

[0320] FIG. 13 shows PCR products from samples from infected and control trees, on separated on an agarose gel (two gels are shown). The lower band is the actin amplicon (positive control). The upper band is C. liberibacter 16S, evidence of HLB infection of the sample trees. “+” is a positive control (C. Liberibacter DNA), and “−” is a negative control (uninfected trees). Trees 73, 101, 105, 112 and 171 are clearly positive for HLB infection.

### Example V

### HLB Infection-Sensitive Parameters—Plant Height

[0321] One of the most pronounced symptomatic responses of young citrus trees to HLB infection is vertical growth retardation. Establishment of a quantitative measurement of this parameter is important to the ability to assess results of treatment(s). Trees were pruned to 50 cm, and then measured for 8 months. Careful measurement of both infected trees and uninfected control trees over the eight months revealed that height differences emerge approximately at 5 months post infection, and proceed to increase, consistently, in successive months:

TABLE VIII

| Months Post-Infection | Control Height (cm) | Infected Plant Height (cm) |
|---|---|---|
| 0 | 50 | 50 |
| 1 | 53.8 | 53.7 |
| 2 | 57.1 | 58.0 |
| 3 | 59.3 | 58.4 |
| 4 | 61.3 | 60.1 |
| 5 | 63.9 | 61.3 |
| 6 | 69.3 | 62.9 |

### Example VI

### Differential Gene Expression in HLB

[0322] Genes that are up-regulated in response to HLB (differentially expressed between infected and non-infected trees), and genes that are up-regulated in response to infection only in a susceptible strain, but not (or to a lesser degree) in a tolerant strain, are attractive targets for silencing. One example is callose synthase, responsible for callose deposition in the phloem. Thus, a callose synthase gene whose regulation adheres to the criteria mentioned above was selected for gene expression analysis. mRNA abundance of genes of interest was compared between infected and non-infected groups of plants, both from experimental groups (e.g. grafting experiments) and from field samples collected from commercial orange groves.

[0323] For each measurement, ten infected and ten non-infected samples were sampled. RNA was extracted according to the protocol described above and cDNA was synthesized accordingly. mRNA levels were compared using the SYBR® Green (Life Technologies, Carlsbad Calif.) protocol for detection of PCR products. mRNA levels were calculated using differential Ct (cycle threshold) calculation (see above). The 18S gene was used as normalizing transcript.

[0324] Average relative mRNA abundance levels detected for PP-2 (phloem-specific lectin PP2-like protein) (FIG. 14), AGPase (ADP-Glucose phosphorylase large subunit) (FIG. 15), GPT (Glucose-6-phosphate translocator protein) (FIG. 16), putative alpha-amylase protein (FIG. 17), oxidoreductase (FIG. 18) and cytosolic copper/zinc superoxide dismutase (CDS1) (FIG. 19) indicated a strong upregulation in the infected as compared with uninfected, control trees. Sets of primers that were used for measurements are depicted below.

| Annotation | direc- | Sequence |
|---|---|---|
| (SEQ ID NO) | tion | (SEQ ID NO:) |
| Phloem-specific | F | AGATTAGTGTTGCCGCTGGT |
| lectin PP2-like | | (551) |
| protein NCBI | | |
| XM_006433409.1 | R | GAAGGAAGGGTTTCCAGGTC |
| (571) | | (552) |
| ADP glucose pyro- | F | CATTCGTTCAGGAATCACCA |
| phosphorylase large | | (553) |
| subunit NCBI | R | CTTCTTTCCAGGCCAAAATG |
| XM_006487154.1(572) | | (554) |
| Alpha-amylase, | F | GCTTACATCCTCACACATCCC |
| putative | | (555) |
| XM_006473264.1(574) | R | CCATCTTTGGTCCAATCTTCA |
| | | T(556) |
| Glucose-6-phos- | F | TT GTGTGGTGGGTAGC |
| phate/phosphate | | (557) |
| translocator, | | |
| putative NCBI | R | GAGCATTGACGGGTTGA |
| XM_006467936.1(573) | | (558) |
| citrus 18S rRNA | F | GCTTAGGCCAAGGAAGTTTG |
| | | (559) |
| | R | TCTATCCCCATCACGATGAA |
| | | (560) |
| cytosolic cop- | F | CTGGAACTAACGGTCGCAAG |
| per/zinc superoxide | | (563) |
| dismutase | R | AAGTGTGAATAATGAGTGCGTGA |
| CSD1 GenBank: | | (564) |
| AJ000045.1(577) | | |
| oxidoreductase, | F | ACCAGCTTCCTCGTTTGTGT |
| zinc binding | | (567) |
| dehydrogenase | R | TCAAGGTGGGAAAATGCTTC |
| family protein NCBI | | (568) |
| XM_006470280.1(575) | | |
| Callose synthase | F | TTCCTCTTCAACCCATCAGG |
| | | (569) |
| NCBI XM_006482747.1 | R | TCCAATCTGTCCAGTCATCAA |
| (576) | | (570) |

### Example VII

### Fine Analysis of Differential Gene Expression by Signal Amplification

[0325] Signal amplification, as opposed to molecular amplification (as in PCR) of nucleic acid sequences provides a sensitive tool for measuring gene expression along the infection cycle of HLB, since it is not limited to fold-changes as in PCR. The expression dynamics of eight different genes, from three different time points were monitored and compared.

[0326] For each of the three time points, ten trees were sampled in triplicate. Five trees were verified for infection by PCR (as described above) and three were graft controls that were verified to be bacteria free. (The exception was time point ‘1 months post infection’ for which it was too soon to verify infection since HLB bacteria could be detected only after 8-20 months post grafting).

[0327] Sample preparation for signal amplification (Quantigene 2.0®, Affymetrix, Inc, Santa Clara, Calif.) is typically as follows: 400 uL of homogenization solution with 4 ul proteinase K was added to each sample. Each sample was homogenized at 25 Hz for 15 minutes per cycle, for a total of 3 cycles, incubated at 65° C. for 30 minutes, and centrifuged to pellet debris. Each homogenate was then transferred to a new tube, resedimented to clarify, and aliquoted to the hybridization plate and processed according to the manufacturer's protocol.

[0328] The genes analyzed by signal amplification include GPT (NCBI Reference Sequence: XM_006449009.1, SEQ ID NO: 721), Alpha amylase (NCBI Reference Sequence: XM_006473264.1, SEQ ID NO: 722), PP2 (NCBI Reference Sequence: XM_006472910.1, SEQ ID NO: 723), AGPase NCBI Reference Sequence: XM_006423259.1, SEQ ID NO: 724), Zinc transporter (NCBI Reference Sequence: XM_006448556.1, SEQ ID NO: 725), MYB transcriptional regulator (NCBI Reference Sequence: XM_006429779.1, SEQ ID NO: 726), CDR1 (NCBI Reference Sequence: XM_006437293.1, SEQ ID NO: 727), Cu/Zn Superoxide dismutase (GenBank: AJ000045.1, SEQ ID NO: 577), Elongation factor 1 HKG (Gene ID: 102578002, SEQ ID NO: 729) and Actin like-HKG (NCBI Reference Sequence: XM_006492793.1, SEQ ID NO: 730).

[0329] Results

[0330] Gene expression was normalized to Actin. Results of gene expression with signal amplification indicated that while certain genes, such as superoxide dismutase (FIG. 23), PP2 (FIG. 22), Zinc transporter (FIG. 21) and MYB (FIG. 20) were differentially expressed only in the later stages of infection (4 and 6 months), other genes (e.g. AGPase, FIG. 24) were differentially expressed at the early stages of the disease, information useful in understanding the transcriptional response to the disease and strategizing regimens for treatment with dsRNA.

### Example VIII

### Analysis of Starch Accumulation Dynamics in HLB Infected and Non-Infected Citrus Plants

[0331] Starch is the major and the most abundant storage polysaccharide in plants and is a primary product of photosynthesis deposited transiently in the chloroplast in the form of insoluble granules. It is synthesized inside plastids, but its function depends upon the particular type of plastid and the plant tissue from which it is derived. Starch synthesis can be influenced by day length, night temperature and the time of the day. Normally, all starch synthesized during the light period is degraded during the night, supplying sugars needed for metabolism in the whole plant. In general, starch biosynthesis starts with the formation of ADP-glucose and then transfer of the glucose moiety on to an acceptor, usually a short chain of malto-oligosaccharides and at the end of whole processes in which participate numerous enzymes they build up final structure of starch granule.

[0332] A major symptom associated with HLB infection is massive starch build up in leaves and petioles. HLB affected trees have starch accumulated extensively in photosynthetic cells as well as phloem elements and vascular parenchyma in leaves and petioles. In contrast, roots from HLB-affected trees are depleted of starch whereas roots from control trees contain substantial starch deposits. Starch accumulation, however, is also observed in response to nutritional deficiencies and viral infection.

[0333] Investigation of the host response through microarray analysis indicated that HLB infection up-regulates starch biosynthetic enzymes: three key starch biosynthetic genes including ADP-glucose pyrophosphorylase, starch synthase, granule-bound starch synthase and starch debranching enzyme likely contributed to accumulation of starch in HLB affected leaves.

[0334] Starch Content Assay

[0335] Simple measurement of the starch content of plant tissues involved solubilizing the starch, converting it quantitatively to glucose and assaying the glucose. Plant tissue must initially be frozen rapidly to arrest metabolism, then extracted to remove free glucose. Starch is solubilized by heating, then digested to glucose by adding glucan hydrolases. Glucose is assayed enzymatically. Iodine-based protocols can also be used, however, they tend to be less sensitive and less accurate, while the enzymatic assays are more suitable for tissues that have a wide range of starch contents.

[0336] Briefly, starch measurement is performed as follows:

[0337] Starch Extraction:

[0338] Leaf tissue is harvested, flash frozen, ground (e.g. in a mortar and pestle), weighed and extracted with ethanol. Starch is pelleted and washed with ethanol, dried and reconstituted in water. Starch is then gelatinized by autoclaving, then digested with alpha-amylase and amyloglucosidase.

[0339] Glucose content of the digested starch samples is measured by the Hexokinase assay [Glucose (HK) Assay, Sigma, St Louis, Mo.]. Glucose is phosphorylated by adenosine triphosphate (ATP) in the reaction catalyzed by hexokinase. Glucose-6-phosphate (G6P) is then oxidized to 6-phosphogluconate in the presence of oxidized nicotinamide adenine dinucleotide (NAD) in a reaction catalyzed by glucose-6-phosphate dehydrogenase (G6PDH). During this oxidation, an equimolar amount of NAD is reduced to NADH. The consequent increase in absorbance at 340 nm is directly proportional to glucose concentration.

### Results:

[0340] FIG. 25 shows the greatly increased starch content (gram starch per gram fresh weight) of leaves of infected (HLB+) compared with uninfected control leaves (HLB−) of citrus trees at a single time point, six months after infection.

[0341] FIG. 26 shows the dynamics of starch accumulation in infected and healthy uninfected control trees. The relative starch content [standardized to starch content of control leaves—i.e. starch content of control leaves at 8:00 AM=1] of leaves from infected and control trees was calculated at 8:00 AM, 14:00 and 20:00. While the control plants accumulated starch during the day (statistically significant positive slope), the much greater starch content of the infected plants showed no statistically significant changes during the day (FIG. 27).

### Example IX

### Lso Disease Sign Mitigation by Gene Silencing

[0342] The effect of gene silencing on disease sign in LSO infected tomato plants can be measured quantitatively, for example, according to differences in starch content of the leaves, or semi-quantitatively using phenotypic scoring, and correlated molecular data indicating gene silencing and the presence of LSO.

[0343] Plants

[0344] Tiny Tim tomato plants were germinated as described above. Plants having two or more true leaves at 6-9 days were excluded from the experiment.

[0345] VIGS Infiltration

[0346] VIGS infiltration was conducted using a 1 ml needleless syringe at the bottom side of the cotyledon, at 6-9 days post germination, as described above.

[0347] 290 plants were divided into the following groups:

[0348] 20 untreated controls

[0349] 50 empty vector (EV)

[0350] 40 PDS (photobleaching silencing control)

[0351] 30 each for GPT silencing, AGPase silencing, PP2 silencing, CalS silencing, LoxD silencing and MYB silencing.

[0352] Plants were kept at 22 degrees C. for optimal gene silencing. After 20 days, all PDS plants (100%) displayed substantial photo bleaching, suggesting robust gene silencing for all treatment groups.

[0353] After exactly two weeks Lso infection was conducted as previously described, according to the following grouping: 10 plants NO VIGS infected, 10 plants NO VIGS uninfected, 30 plants EV infected, 20 plants EV uninfected, 20 plants PDS infected, 20 plants PDS uninfected, 20 plants each individual gene silencing treatment infected and 10 plants each individual gene silencing treatment uninfected.

[0354] Analysis and Sampling:

[0355] Plants were observed at each week after the infection for four weeks. Samples were taken from all plants at two and four weeks after infection.

[0356] At each week, the DSI (Disease Sign Index) index was measured in a ‘double blind’ procedure.

[0357] RNA was extracted from 4 weeks post infection samples, converted to cDNA and submitted to Lso detection protocol, since by that time all infected plants can be detected by PCR. 94% of the plants were confirmed for infection. Plants that were identified as non-infected were excluded from both the phenotypic and molecular (gene expression) analysis.

[0358] Results

[0359] In an ideal situation, candidate HLB-associated genes are up-regulated with infection. While it has been observed that VIGS suppresses gene expression in naïve plants to a certain degree, the combination of VIGS and bacterial infection restores the basal expression levels such that if the gene's up-regulation is responsible for disease symptoms, those would be mitigated upon treatment.

[0360] FIGS. 28-31 show examples of effective gene silencing (measured as relative expression at two weeks post Lso infection) of GPT (FIG. 28), LoxD (FIG. 29), Myb (FIG. 30) and AGPase (FIG. 31). All of the examples show increased expression of the gene in response to infection (red bars), and reduction of gene expression, at least to the levels of uninfected, untreated healthy plants, in plants treated with the VIGS gene expression silencing.

[0361] Disease Sign Index

[0362] FIG. 32 shows the effect of infection, and gene silencing on the phenotype of the plants, expressed according to the semi-quantitative parameters of Disease Sign Index, recorded at 2 and 3 weeks post-Lso infection. (Note that low DSI is a superior phenotype).

[0363] Observation of the phenotypic parameters of DSI indicated good correlation between silencing of some of the candidate genes and phenotype. When compared with the untreated and empty vector-treated plants (EV) at 2 weeks, nearly all of the treated plants had significantly reduced DSI. At 3 weeks post infection, the correlation between gene silencing and low DSI persisted.

[0364] Flower Number

[0365] Another phenotypic parameter that can provide indication of relative health of the plant in Lso infection is the number of flowers observed. When compared with untreated and empty vector plants (EV), flower number of plants in which genes were silenced showed some advantage (FIG. 33), with all infected plants in which genes were silenced having greater flower number at 2 and 3 weeks post infection than the infected, empty vector controls. In particular, silencing of AGPase and GPT was effective in improving flower number at 2 weeks post infection, silencing of MYB and PP2 was effective at 3 weeks post infection. At 2 weeks post infection, the 2 gene groups (marked in orange box) had more flowers in infected compared to non infected plants.

[0366] Water Uptake

[0367] Water uptake is yet another significant phenotypic parameter which indicates relative health of the plant. Infected plants tend to imbibe less water than their non-infected counterparts (see FIG. 34, “untreated” and “EV”). Water uptake is easily measured in planter pots marked for volume in increments (for example, increments of 25 ml), by filling to the top mark (for example, 250 ml) and measuring the reduction in water volume at any given time afterwards.

[0368] FIG. 34 shows the effects of gene silencing of candidate genes on water uptake in infected plants at 5 weeks post infection. Comparison between the untreated or empty vector-treated plants and the gene-silenced plants indicates a significant improvement in water uptake with silencing of some candidate targets (e.g. GPT and MYB), and a positive trend for some others.

[0369] Taken together, the results indicate that gene silencing of some of the candidate gene targets can clearly influence the phenotype of tomato plants in response to Lso infection. Differential effects of silencing of different genes indicates that gene silencing, when effective, can affect parameters separately and at different stages of the Lso infection.

[0370] Although the invention has been described in conjunction with specific embodiments thereof, it is evident that many alternatives, modifications and variations will be apparent to those skilled in the art. Accordingly, it is intended to embrace all such alternatives, modifications and variations that fall within the spirit and broad scope of the appended claims.

[0371] All publications, patents and patent applications mentioned in this specification are herein incorporated in their entirety by reference into the specification, to the same extent as if each individual publication, patent or patent application was specifically and individually indicated to be incorporated herein by reference. In addition, citation or identification of any reference in this application shall not be construed as an admission that such reference is available as prior art to the present invention. To the extent that section headings are used, they should not be construed as necessarily limiting.

1. A method of increasing yield, growth rate, vigor, biomass, fruit quality or stress tolerance of a citrus plant when infected with a plant pathogen, the method comprising introducing into the citrus plant an isolated nucleic acid agent comprising a nucleic acid sequence which specifically reduces the expression of at least one plant pathogen resistance gene product of the plant, thereby modulating at least one plant pathogen resistance response and increasing yield, growth rate, vigor, biomass, fruit quality or stress tolerance of said citrus plant when infected with a plant pathogen.

2. A method of increasing yield, growth rate, vigor, biomass, fruit quality or stress tolerance of a plant when infected with a Candidatus Liberibacter spp, the method comprising introducing into the plant an isolated nucleic acid agent comprising a nucleic acid sequence which specifically reduces the expression of at least one plant pathogen resistance gene product of the plant, thereby modulating at least one plant pathogen resistance response and increasing yield, growth rate, vigor, biomass, fruit quality or stress tolerance of said plant when infected with a Candidatus Liberibacter spp.

3. The method of claim 1, wherein said plant pathogen is a Candidatus Liberibacter spp.

4. The method of claim 2, wherein said plant is a citrus plant or a Solanaceous plant.

5. The method of claim 2, wherein said plant is a citrus plant.

6. The method of claim 1, further comprising monitoring symptoms of infection in the infected plant following said introducing.

7-8. (canceled)

9. The method of claim 1, wherein said plant, when infected, is suffering from HuangLongBing disease (HLB or citrus greening).

10. The method of claim 1, wherein said plant pathogen resistance response is selected from the group consisting of changes in Salicylic acid levels, changes in Jasmonic acid levels, changes in Gibberellic acid levels, changes in Auxin levels, changes in Cytokinin levels, changes in Ethylene levels, changes in ABA phyto-hormones levels, up-regulation of phyto-hormone-related genes, biosynthesis, deposition and degradation of callose, reactive oxygen species production, functional FLS2/BAK1 complex formation, protein-kinase pathway activation, phloem blockage, starch accumulation, starch accumulation in phloem parenchyma cells, polymer sieve formation, changes in carbohydrate metabolism, cambial activity aberrations, sucrose accumulation and carotenoid synthesis.

11. The method of claim 1, wherein said increase in yield, growth rate, vigor, biomass, fruit quality or stress tolerance is a change in a parameter selected from the group consisting of increased water uptake, increased plant height, increased plant flower number, decreased starch accumulation and decreased Disease Sign Index.

12-13. (canceled)

14. The method of claim 1, wherein said plant pathogen resistance gene product is selected from plant gene products having upregulated expression following infection of the plant with said plant pathogen.

15. The method of claim 1, wherein said plant pathogen resistance gene product is selected from the group consisting of the polynucleotide sequences of Table IV and/or Table IV(a).

16. The method of claim 2, wherein said plant pathogen resistance gene product is selected from the group consisting of plant gene products having at least 60% identity to any of the polynucleotide sequences of Table II.

17. The method of claim 15, wherein said plant pathogen resistance gene product is selected from the group consisting of the polynucleotide sequences of Table V.

18. The method of claim 16, wherein said plant pathogen resistance gene product is selected from the group consisting of plant gene products having at least 60% identity to any of the polynucleotide sequences of Table III.

19. The method of claim 1, wherein said plant pathogen resistance gene product is selected from the group consisting of an ADP-glucose pyrophosphorylase large subunit (AGPase) gene product, a glucose-6-phosphate/phosphate translocator (GPT) gene product, a Callose synthase gene product and a Myb transcriptional regulator (MYB) gene product.

20. (canceled)

21. The method of claim 2, wherein said plant is a fruit tree, and optionally, a citrus tree.

22. The method of claim 1, wherein said isolated nucleic acid agent further comprises a cell penetrating agent.

23. The method of claim 1, wherein said introducing is following detection of a symptom of infection of said plant with said pathogen.

24. An isolated nucleic acid agent comprising a nucleic acid sequence which specifically reduces the expression of at least one plant pathogen resistance gene product selected from the group consisting of plant gene products having at least 60% identity to any of the polynucleotide sequences of Table II.

25-30. (canceled)

31. The isolated nucleic acid agent of claim 24, wherein said plant pathogen resistance gene is a HuangLongBing-associated plant pathogen resistance gene selected from SEQ ID NOs: 204-265 and 489-516 or homologs thereof.

32. The isolated nucleic acid agent of claim 24, wherein said plant pathogen resistance gene is a HuangLongBing-associated plant pathogen resistance gene selected from SEQ ID NOs: 1-203 or homologs thereof.

33. The isolated nucleic acid agent of claim 24, wherein said plant pathogen resistance gene is selected from SEQ ID NOs: 623-714 or homologs thereof.

34. The isolated nucleic acid agent of claim 24, wherein said plant pathogen resistance gene product is selected from the group consisting of an ADP-glucose pyrophosphorylase large subunit (AGPase) gene product, a glucose-6-phosphate/phosphate translocator (GPT) gene product, a Callose synthase gene product and a Myb transcriptional regulator (MYB) gene product.

35. The isolated nucleic acid agent of claim 24, wherein said nucleic acid sequence comprises a nucleic acid sequence selected from the group consisting of SEQ ID NOs. 528, 530, 532 and 536.

36. A nucleic acid construct comprising a nucleic acid sequence encoding the isolated nucleic acid agent of claim 24.

37-41. (canceled)

42. A citrus plant comprising at least one exogenous isolated nucleic acid agent comprising a nucleic acid sequence which specifically reduces the expression of at least one plant pathogen resistance gene product.

43. A plant comprising at least one exogenous isolated nucleic acid agent comprising a nucleic acid sequence which specifically reduces the expression of at least one plant pathogen resistance gene product selected from the group consisting of plant gene products having at least 60% identity to any of the polynucleotide sequences of Table II.

44. The plant of claim 43, wherein said plant is selected from the group consisting of a tree, a shrub, a bush, a seedling, a scion, a rootstock, an inarched plant, a bud, a budwood, a root and a graft.

45. The plant of claim 43, wherein said plant is a citrus or citrus-related plant.

46. The plant of claim 42, wherein said plant is a plant at risk of infection with CaLas.

47. A cell of the plant of claim 43.

48-50. (canceled)

51. The method of claim 2, further comprising monitoring symptoms of infection in the infected plant following said introducing.

52. The method of claim 2, wherein said plant pathogen resistance gene product is selected from the group consisting of an ADP-glucose pyrophosphorylase large subunit (AGPase) gene product, a glucose-6-phosphate/phosphate translocator (GPT) gene product, a Callose synthase gene product and a Myb transcriptional regulator (MYB) gene product.

The application's sequence listing, which the Patent Office published only in electronic form, follows.

SEQUENCE LISTING (730 sequences)

SEQ ID NO: 1 - DNA, 828 bp, Arabidopsis thaliana
atggctcttgtcaccttcttgtttattgctacccttggagcaatgacgtcacatgtcaatggttacgccggaggaggttgggtcaacgcacacgccacattctacggtggtggtgatgcttccggcacaatgggaggtgcttgtggatacggaaacctatatagccaaggctatggaaccaacacggcggcgctaagcacggctctattcaataatggtctaagttgtggtgcttgcttcgagataagatgtcaaaacgatggaaaatggtgtcttcctggctcaattgtcgtcacagccacaaacttttgccctcctaacaacgccttaccgaacaacgcaggaggttggtgtaaccctcctcagcagcattttgatctctctcagcccgtatttcaacgcatcgctcaatacagagccggcattgtccccgtcgcttaccgaagagtgccgtgcgtgagaagaggaggaataaggtttacgataaacggacactcttacttcaacctagttctgatcactaacgtcggaggagccggagatgttcactcagcgatggttaaaggttcaagaactggatggcaagcgatgtcaagaaactggggacagaactggcagagtaactcttaccttaacggacaatctctctcattcaaagttacaacaagcgatggccaaaccattgtctctaacaacgttgctaacgcaggctggtctttcggccagaccttcacagtagaagcagttagagagaggggcatgatagtaatttggtcctttctttcaattgaggttaacctaaaaagaagtggtgcttcgagtgcttga

SEQ ID NO: 2 - DNA, 1479 bp, Arabidopsis thaliana
atggcgcgaaaatccctaattttcccggtgattttgctcgccgttcttctcttctctccgccgatttactccgccggtcacgattaccgcgacgctctccgtaaaagcattctcttcttcgaaggtcaacgttccggtaaactccctccagatcaacgcttaaaatggcgccgtgactcagcattacgcgacggttcctccgccggcgttgacttatccggtggttactacgacgccggagacaacatcaagttcggttttccgatggcgttcacaacaacgatgctttcatggagtataatcgatttcggtaaaaccatgggacctgagcttagaaacgccgtgaaagctgttaaatggggaacagattacctccttaaagcgacggcgattcccggagtagtcttcgtccaagtcggagacgcttactccgatcataactgttgggaaaggcctgaagatatggacactctccgtactgtttacaaaatcgatagagctcatcctggttctgacgtcgctggtgaaaccgcagccgctttagccgccgcttcaatcgtttttagaaaacgcgatcctgcttattccagacttctacttgaccgtgccactagggtattcgcgtttgctaacagatatcgcggcgcgtatagtaacagtctctaccacgcggtttgtcctttttactgtgatttcaacggttaccaggatgagttactgtggggagcggcatggctacacaaagcctcgaggaaacgagcgtacagagaattcattgtgaagaacgaggtcattcttaaggctggagataccattaatgagtttggttgggacaataagcatgctgggattaatgtcttaatctccaaggaagtgttaatgggaaaagcagagtattttgagtctttcaagcagaacgcagatgggtttatctgttctatattgcctggaatttctcacccccaagtccaatactctcgaggagggctactagtgaagactggagggagtaacatgcaacatgtaacatcactatctttcctcctattggcttactctaattatctgagccatgccaaaaaggttgtgccttgtggcgaattaactgcttccccatctctcctccgtcaaatcgccaagcgtcaggtggattacattctcggagacaacccgatgggactgtcttacatggttggatacggtcaaaagtttccacgtaggattcatcaccgtggtagctcggttccttcggtttcagcccatccaagccacatagggtgcaaagaaggctctcgctatttcctaagcccaaatcctaacccaaaccttttggttggtgctgtagtcggtggacctaatgtcactgatgcttttccggattcaagaccttactttcagcagtctgagcccacgacttatatcaatgcaccactagtgggccttctcggttacttctccgcccattctacttggcgatga

SEQ ID NO: 3 - DNA, 1851 bp, Arabidopsis thaliana
atggaggctctcttcttgagttcttcttcttcctccattgtagcgtcaaacaagcttactaggttacacaaccattgtgtctggtctacagtgattagagataagaaaaggttcggtcccacttggtgccgtgtaggtggtggtggtgatggtgggagaaacagtaacgcagagaggcctattcgggtttcttcgcttttgaaagacagaggtcaggtactgattagggaacagagttcgccggctatggatgctgagacattggttctgtctccaaacgggaatgggagaaccattgagatcaatggagtaaagactttgatgccttttagtggcgcttctatggtggggatgaaagaaggacttggcataatcagtttcctccaagggaagaagtttctaatcactggctcgaccggtttcttagctaaagtactgattgagaaagtcttgagaatggctcctgatgtcagcaagatatatctcttgattaaagccaaaagcaaagaagctgcgatcgagcggctaaagaacgaggtgttagatgcagagctttttaatactctaaaagagactcatggagcatcttacatgtctttcatgttaactaaactcatccctgtgaccggaaacatttgcgattcaaacattgggttgcaagcagattcagctgaagagattgcgaaagaagttgatgttataatcaattctgctgctaatacaaccttcaatgaaagatacgatgttgctctggacatcaacacaagagggcccggtaatctcatgggattcgccaagaagtgcaagaaactcaaactgttcttgcaagtatccacagcttatgtgaatggacaaagacaaggaaggatcatggagaagccattttctatgggagattgtatagcaacagagaacttcctcgaaggaaacagaaaagcattagatgttgatagagagatgaagttagctcttgaagctgctagaaaagggactcaaaatcaagatgaggcacagaagatgaaggatctcggtctagagcgggcaagatcatatggatggcaagacacttatgttttcaccaaagcaatgggtgagatgatgatcaatagcactcgaggagacgtacctgttgttattataaggcctagcgtcatcgaaagcacttacaaagatcctttccctggatggatggaaggaaacaggatgatggatcctatagttttatgttacgggaaggggcaactcacggggtttttggttgatccaaaaggagttcttgatgtagttcctgctgatatggttgttaatgcaacgttagctgctatagcaaagcatggaatggcaatgtcagatccggaacctgaaataaacgtgtatcagatcgcttcttcggcgataaacccgctggttttcgaagacttagcggagcttctttataaccactacaaaacatccccatgcatggactctaaaggtgatcctattatggtgcgtttgatgaaacttttcaattccgttgatgatttctcggatcatttgtggagagatgctcaagaacggagtgggttgatgagtggtatgagttcagtggatagtaagatgatgcagaagctaaagtttatatgcaagaaatctgttgaacaagccaaacaccttgctactatttatgagccatacactttctatggtggaagatttgataacagcaatacacagagattaatggagaatatgtcagaggacgagaagagagaatttggatttgatgttggaagcattaactggacggactacattacaaacgttcacattcccggtttaagaaggcatgtcttgaaaggaagagcttaa

SEQ ID NO: 4 - DNA, 774 bp, Arabidopsis thaliana
atggctattaaactagcaattctatttaccacatttgttctttttagcctcgccgacgctagaatccccggtatttactccggcggcgcatggcaaaacgcacacgccactttttacggtggcagcgacgcctccggcacaatgggaggagcttgtggttacggtaacctatacagccaagggtacgggaccaacacggctgctttgagtacggcgctgtttaacaatggtatgagttgtggagcctgctttgagctaaaatgcgccaacgaccctcaatggtgtcactcaggtagtccttcgatcctcatcaccgcaaccaatttctgcccaccaaacttggctcagcctagcgacaacggaggatggtgcaacccaccacgtgaacactttgacctagccatgcctgtcttccttaagatcgctcaatatcgcgccggcattgtccccgtctcataccgcagggtgccatgtagaaagagaggaggcataaggttcacaatcaacggtcaccgttacttcaacttggttctgatcactaacgtggctggagcaggagacatcgtgagggctagtgtgaaaggatcacggactggttggatgagtttgagcagaaactggggacaaaactggcaatctaatgctgttttggttggtcaagcactctctttccgtgtcacaggcagtgaccgtagaacatctacttcctggaacatggttccttctaactggcagtttggtcaaacctttgtcgggaagaatttcagggtttaa

SEQ ID NO: 5 - DNA, 3264 bp, Arabidopsis thaliana
atggaccaaggcgcgatggagacactcccggaaaaaccgtcggaagacgagttctccctcgccctccgcaacggcctcattctctgcaacgtcctcaacaaagtcaatcccggttctgttctcaaggtggtggagaatccgattacgccagctattcagtacgcggatggagcggcgcaatcggcaattcaatattttgagaacatgaggaactttcttaaagctgtagaggatatgcagcttttaacatttggagcttctgatctcgagaagggaggatcgtcgaacaaagtagtagattgtattttgtgtttgaaaggtttttacgagtggaaacaagcgggtggagttggagtatggaggtatggagggactgtgaggatagtatcattcaatcgaaaaggcagttctccgccgcagtatgggattggtagtgaaagtactaccgatgagtctgtttctttggatgaatctgagtcttctcagtatgaccagcttttggattttcttcatctttctaatgagatctcagctgaggaatctgaaactgcaatctccttggcttttctttttgatcatttcgcgcttcagcttctacatggttaccttaaggagagtgatgggatcaatgatatgcctttaaatgaaatggtgattgatacattgctgaacagggtagttaaggatttctctgcaatactagtttctcagggagctcagctgggttcgtttctaaggaaaatactgaaatgtgataacggggatctgtcaagatcagagtttctagcagcagtcttcagataccttcagcacagaaaagatttggtgtcaaaggagttttcaaagttttgtaaatgtggcggaaagcttgagtttagtagactaaacgcccgcgaattttctccgggtcatgtagaagctattggtcttcaacagaaagagctggaggaagttaaatcaaattttgtggaaacaagaagccaagttaaacaaatgcagtcagaatggcagaaagagcttcagaggatagtccatcacgttaaggccatggaagttacatcttcttcttaccacaaggttctggaggaaaatcgcttactttacaatgaggttcaagatctcaaaggcaccattagagtttactgcagagtcagacctttcttccaagaacaaaaagatatgcaatcaactgtggattatattggagaaaatggtaatattatcattaacaatcctttcaagcaggagaaagatgcacggaaaatattttccttcaacaaagtatttggacagactgtctcacaagagcaaatctacattgacactcaaccggtaataaggtccgtcctcgacggattcaatgtttgtatcttcgcgtatgggcaaaccggttcagggaaaacgtatacgatgagtgggccagatctgatgacggagacaacttggggcgtgaactaccgagctctacgcgatctcttccagctttcaaatgcaagaacacatgtggtgacttatgaaattggagtccaaatgatcgaaatatataatgaacaagttagagatctactagtcagtgatggttcctccagaagattagacatacgcaataattctcaactcaatggccttaatgtacccgatgcaaacttgattccagtttctaatactcgagatgtccttgatttgatgaggattggccaaaagaatcgtgctgtgggtgccactgctttgaatgagaggagcagccgttctcatagtgtattaactgttcacgtccaaggaaaagaattggcctcaggatccattttaagaggctgccttcatttagtggatttggctggaagtgaaagagtagaaaaatccgaagctgtaggcgagagactcaaagaagctcaacacataaacaaatcgttgtctgcattaggagatgtcatttatgcacttgcacaaaagagttcccacgttccctacagaaatagcaagcttacacaagttctgcaggactccttaggtggacaagcaaaaactttaatgtttgtacatattaatcctgaagttaatgcggtaggggagactatcagcacccttaagtttgcccaaagggttgcatccattgagcttggagcagctcgatcaaacaaggaaaccggtgaaattcgagatcttaaggatgagatatccagccttaaatcggccatggagaagaaggaagcagagctggaacaattgcgatcaggtagcattcggaacacaactgaatgtcagagagcaagagcagtttctcctttccatctcccaagaactggtaacggtgctggaacaaaggctgaggcaagtccacagccaaacgacggtaccagaagctacgagaccagaagttgctcaactggcaagcagagaaagtcagggtttccgtctgcactgagaaatagagaagcaagcccgaggatgccgaatctagcagaagagaggttaaatccgagtccaagtaggagatcactatccacagacagagcatcaaccatcaaaagtaggaataagcccgacgttacccaaaaccttccggtttcaagaacaccttttccagctagagtaccagtagtcaaatccttttcaactgttccattgaacccatcagcagaaaataaccacaggcttcacactgataactcttcagaggcatttcaaaatcatcagaagttaagcgctcgaaagctcttccctgagatcgaggaggaacacataaggcatgcactacacatacgtcaaggtggtgttaagaagaccagagccgagagcagtaaagccaaggcaaagcaaccatcaccagctaggtttcagaaactcgatgttgggatcagtttgcgttctgatgcagattctgaagcaaaggtaggaaattatcagacccaaaaggggaacaacaaccacaatgtgatacactcaagattccaaaacttcgacgtgggtatcagcctattctctgacctttgtgccggtgacaaatcagattcaacactcaagagtgattcctcagagacagacaacgaaccaccctcgaaatctaagaatgcccaaagaaactcgtccaaaaactccctcaaccacaaactaaggacgatctatgctcatgaggacacttcactcgtggacgacaagccttctaatggtacagcccatatcaaagaaggtaataataatatatctatgcctgagttcaggagaagtcgttcaacacatcatgcaaggttcatggtaccatag

SEQ ID NO: 6 - DNA, 790 bp, Arabidopsis thaliana
agcaaatcgtaaaccgccacaaaaccgaaaaaaacactaattgtgctttccctttagattcatttgtattttcttttggagcttttgaacaatggagtcatcacaagcaacgacgaagccaacgagaggagcaggaggaaggaaaggtggagataggaagaagagtgttagtaaatctgttaaagctggtcttcaatttcccgttggtcgtatcgctcgttacttgaagaaaggtcggtacgctctccgatacggttccggtgctccggtttacctcgccgccgttctcgaatacctagccgccgaggtacttgagctagctgggaacgcagcgagagataataagaagaacaggataaaccctaggcatctatgtttagcgataaggaacgatgaggaattggggagattgcttcatggagttactattgctagtggtggtgttcttccaaacattaatccagttcttcttcctaagaaatcaacagcttcttcttctcaagcggagaaagcttctgctaccaaatctcctaagaaggcttgataaagaatagtatcgatgttgctttttggttatattcggatcttagatgaagaagaagaagaagaagaaacaacttgttttttgttttagaggatttgtgtaggtatctgaaatcttcttctctttgttttggtttgtcttatgtaaaaaccatgggaagatgattatgtttgttaacgcaatttgtaatggaaaataattaagttctgggattagtaacttcatctgtctaattaatttctgggt

SEQ ID NO: 7 - DNA, 453 bp, Arabidopsis thaliana
atggagtcatcacaagcaacgacgaagccaacgagaggagcaggaggaaggaaaggtggagataggaagaagagtgttagtaaatctgttaaagctggtcttcaatttcccgttggtcgtatcgctcgttacttgaagaaaggtcggtacgctctccgatacggttccggtgctccggtttacctcgccgccgttctcgaatacctagccgccgaggtacttgagctagctgggaacgcagcgagagataataagaagaacaggataaaccctaggcatctatgtttagcgataaggaacgatgaggaattggggagattgcttcatggagttactattgctagtggtggtgttcttccaaacattaatccagttcttcttcctaagaaatcaacagcttcttcttctcaagcggagaaagcttctgctaccaaatctcctaagaaggcttga

SEQ ID NO: 8 - DNA, 933 bp, Arabidopsis thaliana
atgaacgacttgatgacgaaatcgtttatgagttacgttgacttgaaaaaagcagcgatgaaggatatggaagcaggacctgactttgatcttgagatggcttctacgaaagcagacaagatggatgagaatctgtcatctttcttagaagaagcagagtatgtgaaagcagagatgggtttgattagtgagacgctggctcggatcgaacagtaccatgaagagagtaaaggtgttcacaaggcagagtctgtgaagtctcttcgtaacaagatctctaacgagattgtgtctggtttgaggaaggcgaaatcgattaagtcgaagctggaagagatggataaagccaacaaggagattaaaaggctctctgggactccggtttataggagcagaaccgctgtgactaatgggctgaggaagaaacttaaggaagtgatgatggagtttcaggggctgaggcaaaagatgatgagtgagtacaaggagactgttgagagaaggtacttcactgtcactggagaacatgctaatgatgagatgattgagaagatcatcactgataacgctggaggtgaagagtttctcacgcgagcaattcaggaacatggtaaaggaaaggtcttggaaactgtggttgagattcaagacaggtatgatgcagcaaaggagattgagaagagtctgttggagcttcaccaagtgtttcttgatatggctgtgatggttgaatcgcaaggtgaacagatggacgagatcgagcatcatgtgattaatgcgagccattacgtggctgatggagctaatgagctgaagactgcaaagagtcatcagagaaacagcagaaaatggatgtgcattggtatcattgtgctgcttttgatcattctcattgttgtcatccccatcattaccagtttcagctcttcttga

SEQ ID NO: 9 - DNA, 1374 bp, Arabidopsis thaliana
atggttgctgagaacaataaaaacaaggacgtaacactctctgcatcaatggacaacaacaacaacaacatcaaaggaactaacattcatcttgaggttcatcaaaaggaaccagctttggtcaaacctgaatccgagacacgaaagggcctttacttcttgtcgaatcttgaccagaacatcgccgtgattgttcgtacaatctactgtttcaaatccgaggagagagggaacgaggaagcagtccaagtgatcaagaaagctctgagtcaagttcttgttcattactatcctctcgctggacgcctcaccatcagtcctgaaggtaaactcacagttgactgtaccgaagaaggagttgtgtttgtggaagcagaagcaaactgtaaaatggatgagattggtgacattaccaaacccgatcctgaaactctagggaagcttgtgtacgatgtcgtagacgccaagaacattcttgagatccctcctgttaccgctcaggtgactaaattcaaatgtggagggtttgttctcggactctgtatgaatcactgtatgttcgatggaattggagctatggagtttgttaactcatggggtcaagtcgctagaggcttaccattaacaactcccccattctcagacagaaccattctcaatgctcgaaaccctccaaagatcgagaatctccaccaagaatttgaagagatcgaagataaatccaacatcaactctctttacaccaaagagccaactctctacagatccttctgctttgatccagagaaaatcaagaaacttaagctccaagcaacagagaacagtgagtctctcctcggtaactcatgcacaagttttgaggctttatctgcttttgtctggagagcaagaaccaagtcgttgaagatgttgagtgatcagaaaacgaagcttctcttcgccgttgatggtagagccaagttcgagcctcaactgccaaaagggtacttcggaaatggaattgttctcacaaactccatctgtgaagctggggagcttatcgaaaaaccgttgagtttcgcggtgggattagtcagagaagccattaagatggtaactgatgggtacatgagatctgctattgattacttcgaagtcacgagagcaagaccttctctttcctcgactcttctgatcactacatggtcaagattgggtttccacacgacagatttcggttggggagaaccgattttatccggtccagtagctttgcctgagaaagaagtaactctgtttttgtctcatggagaacagaggagaagcatcaatgtgcttcttggacttcccgctacagccatggatgtgtttcaagaacagtttttacagatataa

SEQ ID NO: 10 - DNA, 429 bp, Arabidopsis thaliana
atgagtacaggcgcaggaagcggaacaaccaaaggtggcagaggaaagccaaaggccaccaaatccgtctctcgatcatctaaagccggtcttcaattccccgtcggaagaatcgctagattcctcaaatccggtaaatacgccgagcgtgtcggtgccggagctccggtctatctctccgctgttctcgagtacctcgccgccgaggtgttggagctggcgggaaacgcagcaagggataacaagaagacacgtatagtaccaagacacattcagcttgcagtgaggaacgatgaagagttaagcaaacttctgggaagtgtgacgattgcgaatggaggagttttgccaaatattcatcagactcttttgccatccaaggttggcaagaacaaaggagatattggatctgcttctcaggagttctga

SEQ ID NO: 11 - DNA, 411 bp, Arabidopsis thaliana
atggctcgtaccaagcagacggctaggaaatcaaccggaggaaaggctccaaggaagcagctggcgacaaaagcggcgaggaaatctgctccggccaccggaggagtgaagaagccacacagattcagacccggaactgttgctttaagagaaatcaggaagtaccagaagagcactgagcttcttatccgtaaactccctttccagaggcttgtcagagagatcgctcaggacttcaaaaccgatcttcgtttccagagcagtgccgtcgccgctcttcaggaagctgctgaagcttacctcgtcggactcttcgaagacaccaatctctgcgccattcacgccaagagggtcacgatcatgcccaaggacatccagctcgcgagaagaatcagaggagaacgagcttag

SEQ ID NO: 12 - DNA, 576 bp, Arabidopsis thaliana
atggagagtaacaacaacgagaagaagaaagttgcaagacaatcatcatccttcagactacgtagcccaagcctaaacgcacttcgtctccaacgaatcttcgacttattcgacaaaaacggcgacggattcataaccgtcgaagagctaagccaagctctaacacgtcttggtctcaacgctgatctctccgatctcaaatccaccgttgaatcatacatccaacctggtaacactggtctcaatttcgatgatttctcttctcttcacaaaacactcgacgattctttcttcggtggagcttgtggaggaggagaaaacgaagatgatccttcttccgcagctgaaaatgaatcggatctcgccgaggcgtttaaggtgtttgatgagaacggtgatggattcatctccgctagagaactgcaaactgttctgaagaaacttggtttacctgaaggtggagaaatggagagagtggagaagatgatcgtttccgttgaccggaatcaagatggtcgcgttgacttttttgaattcaagaacatgatgcgtactgttgtcatcccttcttcttga

SEQ ID NO: 13 - DNA, 819 bp, Arabidopsis thaliana
atggctcaacaacactcttttctcctcttatgcttcttcctctcaatctcttatttactatcttccgcccaaaccgaagccacctcaatcgagagattagtgccaagagacctctacaacaaaattttcatccacaaggacaataccgcttgtcccgcaaatggtttctacacttacgaatcatttgtccaagcgacgaggcggtttccgagattcgggagcgtaggaagccccgtgacacaacgactcgaagtggctgcatttttggctcagatttcacacgagacgaccggaggatgggcaacggcaccagacggaccgtacgcttggggattatgctttaaagaagaagtgagtccacaaagcacttattgtgattcttctgatacacagtggccttgtttccctaacaagacttatcaaggaagaggtccaattcaactatcgtggaactacaattacggaccggccggtcgagccttaggattcgacggtctaaggaatccagaaacggtgtcaaataattcagtgatagcttttcaaacagcactttggttttggatgacgccacagagtcccaaaccttcgtgccatgacgtcatgatcggaaaataccgacctacggcggcggatttggcagctaaccggaccggcgggtttggtttaaccacaaatataataaatggcggtttagagtgtgggattcctggagacggacgggtcaatgaccgaatcgggttttttcagagatatactgggctgtttaaagtagcaactgggccgaatttggactgtgaaaatcaaaggccttatgcttaa

SEQ ID NO: 14 - DNA, 1722 bp, Arabidopsis thaliana
atggctcaagaggaagtacagaaatcggctgatgtcgctgctgctccggtggtgaaggagaaacctattaccgataaggaggttactattcctacccctgtggcagagaaagaggaagttgctgctcctgtctctgatgagaaggcggttccagagaaggaggtgactccggagaaggaagccccagcggcggaagcggagaaatctgtttcggtgaaggaggaagagacggttgttgtagctgagaaggttgttgttttaactgctgaggaagttcagaagaaggcacttgaggagtttaaggagcttgtaagggaggctttgaacaaacgtgaattcactgctccggtgacgccggttaaggaagagaaaacagaggagaagaaaacagaggaggaaactaaagaggaagagaaaacagaggagaagaaagaagagacaacgactgaggttaaggttgaagaagagaaaccggcggttccagcggcggaggaggagaaatcatcagaggctgctccggttgagaccaaatctgaggagaaacctgaagagaaagcagaggtaacaaccgagaaagcatccagtgccgaagaagatggaaccaagaccgtggaagcaatcgaagaatctatcgtctctgtttcaccacctgaatccgccgtagcacctgtcgtggtagagactgtcgccgttgctgaggcagagccagtggagccggaagaagtctcgatctggggagttccactactccaagacgagagatctgacgtgatcctcacgaaattcctccgtgcaagagactttaaggtcaaagaagctttaaccatgcttaaaaacaccgtccagtggcgtaaagaaaacaaaatcgacgaactcgttgaatccggagaagaagtgagtgagttcgagaagatggtgtttgctcacggtgttgacaaagaaggacacgtcgtgatctacagttcttacggtgagtttcagaacaaggagcttttctccgacaaggagaagcttaacaagttcctcagctggaggattcagctacaagagaagtgtgtgagagctattgatttcagcaaccctgaagcgaagtcttcgtttgtgttcgtcagcgacttcaggaacgctccaggacttggtaaaagagccttgtggcaattcatcagacgcgctgttaaacaattcgaggacaattatcctgaattcgccgctaaagagctattcatcaatgtcccatggtggtacattccatactacaaaacattcggatctatcatcacatccccaaggactaggagcaagatggtccttgctggtccatccaaatctgccgatactattttcaaatacatagctcctgaacaagttcccgttaaatacggtggacttagcaaagatactcctttgaccgaagaaaccataacggaagccatcgttaaaccggcagcaaactacactattgaattgcctgcttctgaggcttgcacgctttcatgggagcttagggttttgggtgctgatgtgagctacggagctcagtttgagccaaccaccgaaggaagctatgctgtgatcgtctctaagacacggaagattggatcaaccgatgaaccggtgataaccgattcttttaaggtgggtgaaccgggaaagattgtgatcacaatcgacaaccagacttccaagaagaagaaagtgctctacaggttcaaaactcaataa

SEQ ID NO: 15 - DNA, 636 bp, Arabidopsis thaliana
atggctcgtggaaagattcagcttaagaggattgagaacccggttcacagacaagtgactttttgcaagaggagaactggtcttctcaagaaggctaaggagctctctgtgctctgtgatgccgagatcggtgttgtgatcttctctcctcagggcaagctctttgagctcgctactaaaggaacaatggagggaatgattgataagtacatgaagtgtactggtggtggtcgtggttcttcttctgctacttttactgctcaagaacaacttcaaccaccaaatcttgatccgaaagatgagatcaacgtgcttaagcaagagattgagatgcttcagaaagggataagctatatgtttggaggaggagatggggctatgaatcttgaagaacttcttttgcttgagaagcatcttgagtattggatttctcagattcgctctgctaagatggatgttatgcttcaagaaattcagtcattgaggaacaaggaaggagtcctcaaaaacaccaacaagtatctcctcgaaaagatagaggaaaacaacaatagcatattagatgctaacttcgcagtcatggagacaaactattcctatccgctaacaatgccaagtgaaatatttcagttctag

SEQ ID NO: 16 - DNA, 513 bp, Arabidopsis thaliana
atggatcatgatcacatgcatggaatgcctcgaccatcatcatcatcatcatcatcaccatcatccatgatgaacaatggatccatgaacgaaggaggaggacatcaccacatgaagatgatgatgcacatgaccttcttttggggcaagaacacggaggttctcttctccggttggcccggaacaagctccggcatgtatgctctttgtcttatctttgtcttctttctcgccgtcctcaccgaatggcttgctcattcctctctcctccgtggctccaccggagattcggctaatcgtgccgccgggttaatccaaaccgccgtgtataccctccgtatcggcctcgcctatctagtcatgctcgccgtcatgtcgtttaacgccggtgtgtttctcgtcgctctggccggtcatgccgttggtttcatgttgttcggaagccaaactttccggaatacctccgatgaccggaaaactaactatgttcctccctcaggttgtgcttgttga

SEQ ID NO: 17 - DNA, 843 bp, Arabidopsis thaliana
atggcttctacttttaggctctctattagcttcctcactctcatcctcttctctctgtgggtagtggaggcacacacgtctagaaagttgatatcaatcaaggaaaaagaaggtcaagatattagtcatttgctcaaagatggtgaatttgatgacccttcgttgtacatgtatttcacactcaatgatctcaaactaggaaccaaattgctgatttacttctacaaaaacgatcttcaaaagcttcctccacttctcacaagacaacaagccgatctcattcctttcactaagtcaaagcttgacttccttctcgaccacttctctatcaccaaagactctcctcaagggaaagccataaaggagactttgggacattgtgatgctaaagctattgaaggagagcataagttttgtggaacttctttggagtcattgatcgatcttgtgaagaaaacaatggggtataatgttgacctcaaggtcatgacgactaaagtaatggtaccggcccaaaattcgataagctacgctttgcataactacacattcgtcgaggctccaaaggaacttgttgggattaagatgttgggatgtcacagaatgccttacccttatgctgtttactattgccatggacataaaggtggaagtagagtctttgaagttaatttggtgacggatgatgggagacaacgggtagtaggacccgctgtctgccacatggacacatccacgtgggacgcggatcatgtagcttttaaggtgttgaagatggagccgaggtcagcaccggtttgccatttcttccctcttgataacattgtgtgggtaacaaagtaa

SEQ ID NO: 18 - DNA, 825 bp, Arabidopsis thaliana
atggcgatacatttatacaaaacttctaccccgagcacacgcaatggagccgtagacagtcaagtgaaatccaatccacgaaataatttgatctgtgggcagcatcattgtggtaaaggtcgtaatgccagaggaataattaccgcaaggcatagagggggaggtcataagcgtctataccgtaaaatagattttcgacgaaatgcaaaagacatatatggtagaatcgtaaccatagaatacgaccctaatcgaaatgcatacatttgtctcatacactatggggatggtgagaagagatatattttacatcccagaggggctataattggagataccattgtttctggtacagaagttcctataaaaatgggaaatgccctacctttgaccgatatgcccttaggcacggccatacataatatagaaatcacacttggaaggggtggacaattagctagagcagcgggtgctgtagcgaaactgattgcaaaagaggggaaatcggccacattaaaattaccttctggagaggtccgtttgatatccaaaaactgctcagcaacagtcggacaagtgggaaatgttggggtaaaccagaaaagtttgggtagagccggatcgaaatgttggctaggtaaacgtcctgtagtaagaggagtagttatgaaccctgtcgaccatccccatggaggtggtgaagggagggctccaattggtagaaaaaaacccgtaaccccctggggttatcctgcacttggaagaagaactagaaaaaggaaaaaatatagtgagactttgattcttcgtcgccgtagtaaatag

SEQ ID NO: 19 - DNA, 2229 bp, Arabidopsis thaliana
atgcagatttctcttcaaatccatttatcttccttcacttttcttcttcttattttccttcttccagtactctctgagtctcaggtagcttcaagtgaatcacaaactcttcttgaaatccagaagcaactacaatatccacaggttcttcaatcatggactgatacaaccaacttctgtcacattcgtccgtctccttccttgagaatcatctgcctccatggtcacgtaacagagttaaccgtcaccgggaacagaactagtaagctctctggaagttttcataaactcttcactcttcttacacaactatcgagcttaaagactttgtctcttacttctctcggaatttctggttctctttctcctaagatcatcactaagctatcaccgtctcttgagtctctcaatcttagctctaatttcatctctgggaagattccagaagagattgtgtctttgaagaatctgaaaagccttgttttaagagacaatatgttctggggttttgtctctgatgatctcagaggattatcaaatcttcaagagctggatttgggaggtaataaactcggtcctgaagttccttcactcccaagtaagctcaccactgtttcattgaagaacaactcctttagatccaagattccagaacagatcaagaagctgaataaccttcaaagtttagacctttcttccaacgaattcaccgggtcgattccagagtttctgttttcgattccttctcttcaaattctcagtttggatcagaatctgttaagcgggtcacttccaaattcttcttgcacctcctcaaagattataactttagacgtgtctcacaatcttttaactggaaagcttccttcttgctactcttcaaagagtttcagtaatcagacagtgcttttctcattcaactgcttgtctttgattggcactcctaacgcgaagtatcagcgtccgctttctttctgtcaaaaccaagcaagcaaggcaatagctgtggaacctatccccaaggctaaagataaagattctgcaagaatcaaactcgggttagtgattttgataatcatcggtgtgatcatccttgcagcaattttggttctgttggttttgattgccctcaaaagaagaagatcaagatcagaagatgatccttttgaagtgaacaacagcaacaatgagagacatgcctctgataaagtctctgtttgcagcaccacaactgccagctctaagtcattaccagattcaagacgtgtaccacagacaatgagatctgcagtgattggtttgccaccgtaccgcgttttctccttggaggaactggaagaagcgactaacgactttgatgcagctagcctgttctgcgaacagctgtatagaggttgtctaagagaaggcataccagtgacagtgcgagttatcaagctgaagcagaagagcttgccacaaagcttagctcaacagatggaagttttatcaaagctaaggcatatgcatttggttagcgttcttggacactccattgccagtaaccaagaccacaatcaacacgctggacacaccatcttcattgttcaagaatacatctctagtggatcattgcgggactttctcacaaactgtaggaagaaagaggtactgaaatggcctcagagaatggcgatagcaataggagtcgctcgagggatacagttcttgcatatgggagtagcaccaggaatctttgggaacaatttgaagatagagaacatcatgcttgatgaaacactcacagtaaaaatcagtggctatactattcctttaccatccaaggttggagaagagaggcctcaagccaaaaaacctcggagtaatgaagatagagagaaagaagatgtgtaccagtttggagtgatactactacaaatcatcacagggaaagtagttgctgcaggatcttcagagatgggaagtttgaagcttcagctggagaacggtttgagagatgaaccatcagtattgagcagcttagcagatccatctgttaaaggatcatatgcttatgagtcgttgaggacgacagtagagtttgctatcaactgtctttgcgaagatcagagcaagcgtccttccatagaagacgttgtgtggaatctacagtatacaattcaagtgcagcaaggatggagaccaagcagtgggaatcatgaatcatccatgaaagcaatatatgaatga

SEQ ID NO: 20 - DNA, 1308 bp, Arabidopsis thaliana
atggggcttgagatcacggtaacttctcaggaactcgtcaagccctctcctcgaaaccttaatcatcctccatgccatcatcatctctctttccttgatcagcttgctcctcccattttcatgcctttccttttcttttaccataacaagactaatctatcagacaaagaacgaagtgatcacatcaagagttctttgtctgaaatattgaatctctattaccccttggcaggacgcatcaagaactcgggtgatgttgttgtgtgcaacgatgtgggtgtgtctttcgtcgaagccaaagccgattgcaacatgtcacagattctagaaaacccaaatcctaacgaacttaacaagcttcatccattcgaattccatgaagtgagtgacgtgcctctcacggtacagctcactttctttgaatgtggcggcttagcactcggaataggcctttctcataaactctgtgatgcactgtctggtctcatcttcgtcaacagttgggcagcttttgctcgtggccagactgatgaaatcattactccttcttttgatctcgccaagatgtttcctccgtgcgacatagaaaacttaaacatggctacaggtatcacgaaggagaacatagtaaccagacgcttcgtgttcttgagatcttctgttgagtctttaagagaaagattcagcggaaacaagaagatccgcgcgacacgtgttgaggtcttatcggtattcatatggagccgtttcatggcttcaacaaaccatgatgataaaaccggaaagatctatacactgattcatccagtgaacttgcgtagacaagcagatccagatataccagacaacatgttcgggaacatcatgaggttctctgttactgtccctatgatgataatcaatgaaaatgatgaagaaaaggcttctcttgtggatcagatgagagaggagattagaaagatagacgcagtttacgtgaagaaacttcaagaagataacagaggacacctagagtttctaaacaaacaagcttcaggttttgtcaatggagagattgtatcgtttagcttcacgagcctctgcaaatttccggtgtatgaagcagatttcggatgggggaaacctttgtgggttgcctctgcaagaatgagctacaaaaatcttgtagctttcattgatactaaggaaggtgatggaattgaagcttggatcaaccttgaccagaacgatatgtctagattcgaagccgatgaggagttgcttcgctatgtctcttcaaacccaagtgtgatggtctctgtatcttga

SEQ ID NO: 21 - DNA, 558 bp, Arabidopsis thaliana
atgggcagttttctctccttctttcttatttcttctcgaacactagccctcgtcctaatttccgtcacaggagaaacccttgaatctaatttcttgcatcacaagaaagagaaactaactcatttcagagtatactggcacgatattgtaaccggccaagattcgtcttcggtgtcaatcatgaatcctccgaaaaaatacacgggggcaacgggctttggtctcatgcgtatgattgataaccctttaacgctcacaccaaaattaagctccaaaatggtgggaagggcacaagggttttatgcaggcacatctaaagaagaaataggattattgatggctatgaattttgcgattcttgatgggaaatacaatggaagcacgatcacagtgttaggaagaaattcagtgtttgataaggtgagggagatgccagtgattggaggaagtggacttttccgatttgctaggggttatgttcaagctagcacacatgagtttaatctcaagacagggaacgccatcgttgagtataattgttatcttttgcactactaa

SEQ ID NO: 22 - DNA, 1380 bp, Arabidopsis thaliana
atggattactctttccttctaatcattctcttactcacaatctctacttcatgttgtgctgctccttcttcttatgtggaagaacaattgagagacagaatcagtaacttacctggacaacctagtaatgtcgattttagacagtactcaggctatgtcactgtgcatgaagaacgtggaagagctttgttctactggttggtcgagtctccgttggcccgtgacccaaagtctagacctttggttctgtggctcaatggtggccctggttgttcttctgttgcttatggtgctgctgaagaaattggaccttttcgtgttggttctgatggcaagactcttcattccaaactttatgcttggaataaattggcaaacttgctattcttggagtctccagctggagttggtttctcatattcaaacacaacttcagatctttacacaaccggtgatcagagaacagctgaggattcgtacatatttcttgtcaactggtttgagaggtttccacaatacaagcatagggagttttacattgttggagaaagctatgcaggtcattttgttcctcaactgtctaaacttgtccatgaaaggaacaagggcttcaagaacccggctataaacctcaaaggttttatggtgggaaatgctgttacagatgactatcatgattatataggaacatttgaatactggtggaatcacggtctcatatccgattccacgtatcaccaactaaagaccgcgtgctactcagtatcatctcagcatccttcaatgcagtgtatggtggctctgagaaatgccgaattagagcaaggaaatatcgatccatatagcattttcaccaaaccttgcaacagtactgtggcacttaagagattcttaaagggtcgctacccatggatgtcaagagcttatgatccttgtacagagagatattcgaatgtgtattttaaccgcttggacgttcagaaggctctccacgcaaatgtcactcgcttatcttacccctggaaagcatgcagtgacattgtaggaagctattgggacgattctcctctgtctatgcttcctatatacaaagaattgattactgcaggtctcaaaatatgggtcttcagtggggatacagatgctgttgttcctataaccgctacccgatactctgtagatgcactgaagctagcaaccatcacgaactggtacccgtggtacgaccatggcaaggtaggtgggtggagtcaagtttacaaaggacttacattagtgacagtagcaggagctggtcatgaagtgcctctacaccgtccccggcaagcctttattcttttcagatcctttttagagagcaaaccaatgcctatgacttga

SEQ ID NO: 23 - DNA, 402 bp, Arabidopsis thaliana
atggctgaaaaggcggtcaccatccgaaccaggaaattcatgaccaacagacttctctccaggaagcagttcgttattgatgttcttcaccctggaagagccaatgtttcaaaggctgagctgaaggagaagctagcaaggatgtacgaggtcaaggatccaaatgcaatcttcgtattcaaattcagaacccactttggaggtggtaaatcatccgggtttggtttgatctatgatactgttgagagcgctaagaagtttgaacccaaatacagacttatcaggaatggacttgacactaagattgagaagtcaaggaaacaaattaaggaaaggaagaacagggcgaagaaaatccgtggtgttaagaagacaaaggctggtgatgccaagaagaagtga

SEQ ID NO: 24 - DNA, 1026 bp, Arabidopsis thaliana
atgacttcgatcgttttctttcttctagccattcttttgagttccagaacttcaggagtcacatctcgtggcgggctctttgaagcttctgccgtagagaaacatgagcaatggatgtctcgattcaatcgcgtgtactcagacgattctgagaaaacgagtaggttcgagatctttacgaataacttaaagtttgtcgagagcatcaatatgaatacgaacaaaacgtacacgttggatgttaacgagttctctgatctcaccgacgaggaatttaaggcgaggtacacggggctggtggtgcccgaaggtatgaccagaatttcaacaactgattctcatgaaacggtatcgtttagatatgaaaacgttggtgaaaccggtgagagcatggattggatacaggaaggggctgttacatccgttaagcaccaacaacaatgtggatgttgctgggctttctcggcggtggcagcagtggaaggcatgacgaagattgcgaatggagagcttgtatcgctgtctgagcagcaactgttggattgtagtacggaaaacaatggatgtggcggagggataatgtggaaagctttcgactacattaaagaaaaccaaggtatcaccacagaggataactatccttaccaaggagcacaacaaacatgtgagtcaaatcatctagctgctgctaccatcagcggatacgaaacggttccccaaaatgacgaggaagcattgctaaaagcagtgtctcaacagcctgtttccgtggcgatcgaagggtcaggatatgagtttatacactactcgggagggatatttaacggagagtgtgggacgcagcttactcatgcagttactatagttggttatggggtgagcgaagaaggcatcaagtattggttgttgaagaactcatggggagaatcttggggagaaaatggttatatgagaatcatgagagacgtagattcacctcagggaatgtgtggtttggccagccttgcttactatccagttgcttga

SEQ ID NO: 25 - DNA, 2688 bp, Arabidopsis thaliana
atgctcttttgggttttgctcagtagtttctgtgtgttttgtttctccagtccagatggtttcttgagcttatcatgtggcggctcaagttacaccgctgcttataacatctcatgggtttcagacaacgattatatcgaaacaggtaacactaccacggttacttacgccgaggggaattctacttccagtgttcccatcagattattcccggatcctcaaggtcgccaatgttacaagttacctgtgaggaaagacttgtcttcagttctgattcgtgctacattcgtttatagaaactatgatagccagaatagtcctccagcatttcatgtctctcttggaaggagaatcactagtactgttgatcttagaaccaatgatccttggattgaagagttagtttggccagtcaacaatgattctcttttgctttgcttgcttgcggttaaaggaagaggtattccggttatctcttctctagaagtacggccacttcctttaggttcttacaaatacagcctggagggttcaccagatataattctcaggagaagttaccgaatcaatagcggatacacaaatgggactatccggtatccttcagatccatttgatcgaatatgggatccggatcaaagttattcaccgtttcacgcctcttggagcttcaatggactcacaaaattgaattccttcaatattactgagaatccaccagcttctgttcttaagacagcaagaattcttgctcgcaaagaaagtctttcatatactctttctctacatacaccaggggactactacattatcctctactttgctgggatactctcactctccccttcttttagtgtgacgatcaatgatgaagtcaaacaatctgattacaccgtaactagctcagaagctggtaccttgtactttacgcaaaaaggaatcagtaagttaaacatcaccctcagaaaaatcaagttcaatcctcaagtgagtgctcttgaggtatatgaaatcctccaaatccctcctgaagcttcttctaccacagtttcggcacttaaagtcatagagcaatttaccgggcaagaccttggatggcaagacgacccatgcacaccgcttccttggaaccacatcgaatgtgaaggaaaccgtgttacatcattgttcctttcaaaaatcaacctgaggtccattagtccaacattcggagacttgctcgatctcaaaacactcgacttgcataatacatcacttacaggagcaatacagaatgtaggcagccttaaggatctccagaaactgaatttgagcttcaatcagttagaatcttttggctccgagctggaagatctggttaaccttgaagttctggacctgcaaaacaacagcttacaaggatcagttcctgaaacattaggaaagctgaagaaacttcgtctcctgaatctggaaaacaataacttagtaggtcccttgccacagtctcttaacataacgggtctggaagtcaggataacgggaaatccatgcctttcgttctcttcaatatcatgcaacaatgtgtcttcaacaattgacacaccacaagtcactatccctatcaataagaaacaaagaaaacagaaccgtatagcgatcttgcttggagtttctggtggagccttgtttgccacctttcttgtctttgttttcatgtcgatcttcacgaggagacagagaaacaaagagagagatataaccagagcacaactgaaaatgcagaactggaacgcttcaagaatcttttctcacaaagagatcaagtcagctactagaaatttcaaggaagtgattggtcgtggaagttttggagctgtataccgtggaaaactaccagatggaaaacaagttgcggtcaaagtgcgatttgatagaactcaacttggagctgattctttcatcaatgaggtgcaccttttgtctcagatccgccaccaaaatctagtttcatttgagggcttctgctatgaaccaaaacgtcaaatactggtgtatgagtatctgtctggtggatccttagctgatcacctttacggtccacgtagcaaaaggcattcattgaactgggtttcaagactaaaagttgctgttgatgctgcaaaaggattggactacctgcataatggaagtgagccgagaattatacatcgggatgtaaagagcagtaacatacttttagacaaggatatgaacgcgaaagtttctgattttggcctgtcaaaacaatttacaaaagcagatgcatctcatattactactgttgttaaaggcaccgcaggctaccttgaccccgaatattactctaccctgcagctgacagagaaaagtgatgtctatagctttggtgtggttctgttggagcttatctgtggaagagaacccttaagtcactcaggatcaccagattcgtttaacttggtcttatgggctaggccaaacttacaagcaggagcttttgagattgtggatgatatcttgaaggagacatttgatccagcgagcatgaaaaaagctgcttcgattgctataagatgtgtgggaagagatgcatctggaagaccgtctatcgccgaagttttgactaaactgaaagaagcgtacagtcttcaactctcatatctagctgcttcagcacatacagactga

SEQ ID NO: 26 - DNA, 2319 bp, Arabidopsis thaliana
atgaagctaacacataacttctcgtttcttcttcttcttcttcttgttcacatgagctcgaaacacattcttgcttctaaagattcgtcttcatatgtggtgtacttcggagctcactctcatgtcggagagataacagaagatgccatggatcgagtcaaagaaactcactacgactttcttggttccttcactggaagccgtgagagagccacagacgccattttctactcatacacaaagcacatcaacggattcgctgctcatctagaccacgaccttgcttatgaaatctccaaacaccctgaagttgtgtctgtcttcccaaacaaagctttaaagcttcacacgactcgatcatgggactttttgggtttggaacataactcttacgttccttcctcttccatttggagaaaggctaggttcggagaagataccattattgcaaatctcgatacaggtgtgtggccagaatcaaagagctttagagatgaaggcttgggaccaattccttcaagatggaagggaatatgtcaaaaccaaaaagatgccactttccattgcaataggaaactgataggagcaaggtacttcaacaagggctacgcagccgccgtaggacatctcaactcaagcttcgactctccacgtgatctcgacggccatggctcccacactctctccaccgccgccggagattttgttcctggagtcagcatcttcggccaaggcaacggcacggccaaaggtggctcccctcgcgccagagtggccgcgtacaaagtctgctggccgccagtcaaaggcaacgaatgctacgacgcagacgtcctcgctgctttcgacgctgccatacacgacggagctgacgtcatatccgtctctctaggcggcgagcctacctcgttttttaacgacagtgtcgctattggttcctttcacgccgctaagaagcggatcgtggttgtttgctctgccggaaactctggaccggcagatagtacggtttctaatgtcgcgccatggcagattaccgttggtgctagcaccatggaccgtgagtttgctagcaatcttgttctcggtaatggaaaacattacaagggacaaagcttgtcatccacggcattgccacatgctaagttctatccaattatggcatctgtaaatgcaaaagctaagaacgcttcagctttggatgcacaattatgcaaacttggatcgcttgaccctataaagacaaagggaaagatattagtgtgtctcagagggcagaacgggagggtggaaaagggtcgggccgtggctttagggggtggcatagggatggttcttgagaacacttatgtcaccgggaatgatttactcgctgacccgcatgtccttccagccacacagctcacttctaaggatagttttgctgtgtcaagatatatcagccaaaccaagaagccgattgcacacattactccttcaaggacagatttgggactaaaaccagcgcctgtaatggcttcattttcttcaaaaggtccaagcatagtggctcctcagattctgaagcctgacataactgctcctggtgtgagtgtgatcgctgcctacactggagcagtctctccaacaaacgaacagtttgatcctcgacgacttctgttcaatgctatttcaggaacctctatgtcttgtcctcatatctctggcattgcgggtcttctcaaaactcgttatccttcttggagccccgcagctatccgctctgccatcatgactaccgcaacaataatggatgacattcctggacctatccaaaatgcaaccaacatgaaggcaacacctttcagttttggggcaggacacgtccaaccaaatttagctgtgaatcccggtctcgtatacgatttaggcatcaaggattacctcaacttcttatgctcacttggatacaatgcatcacaaatctctgtattctcgggcaacaactttacttgttcaagccctaaaatcagtcttgttaacctcaactatccttccatcacagttccaaacttaacatcaagcaaagtcaccgtttcaaggactgttaaaaacgttggacgaccttcgatgtataccgtcaaggtgaataacccacagggtgtttatgtcgcggtgaagccaacgagcttgaatttcaccaaagttggagagcaaaagacgtttaaagtgatccttgtgaaaagtaagggaaatgtggctaagggctatgtgtttggagaattggtttggtcagacaagaagcatcgtgtgagaagtcccattgtggtgaagctctaa

SEQ ID NO: 27 - DNA, 2265 bp, Arabidopsis thaliana
atggcttcttcttcttcttcttcttcctccatcacaatcatcaccaccttcctcttccttctcctccacacaaccgccaaaaaaacctacatcatccgcgtcaatcactccgataaaccggaatcattcctcactcaccacgattggtacacatctcaactcaattcagaatcatctcttctctacacttacacaacctccttccatggcttctccgcttacctcgactccaccgaagccgattctctcctctcctcctcaaactcaatcctcgatatcttcgaagatcctctctacacacttcacactacgcgtactcctgagtttctcggtctcaattccgaattcggtgttcacgatctcggttcttcttctaacggcgttatcatcggagttttagatactggcgtttggcctgaatctagaagcttcgatgatactgatatgcctgagattccttctaaatggaaaggagaatgtgaatctggttccgatttcgattccaagttgtgtaacaagaagcttatcggagctagaagcttctccaaaggatttcaaatggcttctggtggtggtttttcgagtaagcgtgaatctgtttctcctcgtgatgttgacggacatggaacacatacttcaactaccgccgcgggatccgccgttagaaacgctagcttcctcggttacgccgccggtacggccagaggtatggccactcgtgctcgtgttgctacttataaagtttgttggagtactggttgttttggatctgatatactagctgctatggatcgagctatacttgatggtgttgatgtgctttcgttatctcttggtggtggttctgctccgtattatcgcgatacgattgcgattggagcgttttcggctatggagagaggtgtttttgtgtcttgttctgctggtaatagtggtcctactagagcttctgttgccaatgttgctccttgggttatgactgttggtgctggtactttagatagagattttccggcttttgcgaatctcggtaacgggaaacgacttaccggtgtttcgctgtatagcggtgtaggaatggggacgaagccgcttgaattggtttataataaagggaatagtagttcgagtaatctttgtttacctggttcgcttgattcgagtattgttcgtgggaagattgttgtttgtgatagaggtgttaatgctagagttgagaaaggagctgtggttagagatgctggtggtttagggatgataatggcgaatactgctgcgagtggagaggagcttgtggcggatagtcatttgcttcccgcgatcgctgtagggaagaagactggtgatttacttagggagtatgttaagtcagattctaaaccaaccgctcttcttgtttttaaaggaacggttcttgacgttaagccgtctcctgtggttgctgcttttagctcgagaggtcctaatactgttactcctgaaatcttgaagcctgatgttattggtcctggagttaatattttggctggttggtctgacgctattggtcctactggtcttgacaaggactctaggaggactcagttcaacatcatgtcaggtacgtcaatgtcatgcccacacatcagtggtttagcgggtcttttgaaagcagctcaccctgagtggagtccgagtgctatcaaatcagctctcatgactacagcttacgttcttgacaacaccaacgctcctctccatgatgctgcagacaacagcctatctaacccatatgctcacggctcgggccatgtagatccccaaaaggctctctcaccaggtcttgtctacgacatctcaaccgaggaatacatcaggtttttgtgctctctagactacacagtcgatcacattgttgcgattgtgaagcgacctagcgttaactgctcgaagaagttctcagatcctggtcagctcaactacccaagtttctcggttttgtttgggggtaaaagagttgtgcggtacactcgggaagtaacaaatgttggtgcagcaagctcggtttacaaagtgacggttaatggagctcctagtgtcggaatctctgttaaaccatcgaaactttcgtttaaaagcgtgggagagaagaagaggtacacagtcacgtttgttagcaagaaaggagtgagtatgacgaacaaggctgagtttggttccatcacttggagcaatccgcagcacgaagtgagaagtcccgttgcattctcttggaaccggttttga

SEQ ID NO: 28 - DNA, 4545 bp, Arabidopsis thaliana
atggattttattgagatctcgttgatctttcgagagcatttgccactactggaactatgttcggtcatcatcaacctcctactctttcttgtctttctatttgctgtctccgcgaggcagattctcgtctgcgtgagaagaggcagagataggctctctaaggacgatacggtttcagcttctaatcttagcttggaaagagaggttaaccatgttagtgttgggtttgggtttaatctgtctttgctctgttgcttatatgtgttaggcgtccaagttttggtgttagtatatgatggggttaaggttagaagagaagtcagtgactggtttgttctttgctttccagcttctcagagtttagcttggtttgtccttagcttcttagttcttcatttgaaatacaagtcttcagagaagctacccttcttggtgaggatatggtggttcctggcgttttcgatttgcctctgtactatgtatgtcgatggaagaaggctagccattgaaggttggagcagatgttcttctcatgttgtcgccaatttagctgttacacctgctcttgggtttctctgctttctggcctggagaggcgtttctggtattcaagttaccagaagctcctctgatcttcaagagcctttgcttgttgaagaagaggcagcttgtcttaaagttactccatatagtactgctgggctagttagccttattacgctttcatggttggatccacttctctcggctggttcaaaaagaccgcttgagcttaaggatataccgcttcttgcaccaagagatagagccaaatcaagttacaaggtcttgaagtcgaattggaagagatgcaagtccgagaatccttcaaagcctccttctttagctcgtgcaattatgaaatcattttggaaagaagctgcttgcaatgccgtatttgctgggttgaatactcttgtgtcctatgtcggtccttacttgatcagctactttgttgattatcttggagggaaggagattttccctcatgaaggatacgtactcgctgggatattctttacgtccaagcttatagagacagtcaccacccgccagtggtatatgggtgttgatatcctagggatgcatgttagatcagctcttacagcaatggtataccgaaaaggtctcaaactttcaagtatagccaagcagaaccacacgagcggtgaaattgtaaactacatggcagtcgatgtccagcgcataggagattactcatggtatcttcatgatatttggatgcttccgatgcaaatagttcttgctcttgcaatcctatataaaagcgtgggcatagctgctgtagctacattggttgctacaataatctcgattcttgtcacgattccactcgctaaggtccaggaagactatcaagataagttgatgactgcgaaagatgaaagaatgaggaaaacctcagagtgtcttaggaacatgagagttctgaaattgcaggcatgggaagatcgttatagagtgagattggaagaaatgagggaagaggagtatggttggcttcgcaaagccttatattctcaggcttttgttacttttatcttttggagttcccccatttttgtcgccgcagttacattcgctacttcgatatttctaggcactcaacttaccgctggaggtgttctttctgctctggcgacattcagaattcttcaggagccacttcggaactttcctgatctggtttcaatgatggctcagacaaaggtttctcttgataggatttctgggttcttgcaggaggaagaacttcaagaagatgcaactgttgttattccacggggactttcgaatatagccatagagattaaagatggtgtgttttgttgggaccctttttcttcaaggccgacattatctgggattcagatgaaagtggagaagggtatgcgtgtggctgtctgtggcacagttggctctggaaaatcaagttttatctcttgcatcctaggggaaatcccaaaaatctctggcgaagttagaatatgtggtactactggttatgtgtctcaatcggcttggattcagtctggtaacattgaagaaaacattctatttggcagtccaatggagaaaacaaagtacaagaatgtgatacaagcatgttccctaaagaaagatatagagcttttctcacatggggaccaaactattatcggggagagaggtataaatctcagcggaggtcagaaacagcgtgtacaacttgcaagggcattatatcaagatgctgacatttatttactagacgacccttttagtgctcttgatgcacacactggctctgatttgtttagggattatattctatctgcattggctgagaaaactgtggtttttgtaacgcatcaagttgagtttctccctgcagctgatctaatattggttctgaaggaaggcaggattattcaatcgggtaaatatgatgatctgctgcaagcaggtactgattttaaggccttagtgtctgcccaccatgaagcaatcgaggcaatggacatcccaagtccctcctcagaagactctgatgaaaatcctattcgcgatagtttggtcttgcataatccaaagtctgatgtttttgaaaatgacatcgagactttggcaaaggaagtacaagagggaggatctgcttcagatctaaaggcaatcaaagagaagaagaagaaagctaagcgttcccgcaaaaagcagcttgttcaagaagaggaacgagtaaagggaaaagtcagcatgaaggtgtacttgtcatacatgggtgctgcatataaaggggctctgattcctcttattatactcgcacaagctgctttccaatttcttcagattgctagtaattggtggatggcttgggcaaatcctcaaactgaaggtgacgaatctaaagtggatcctactctgcttctcatcgtttatacggctttagctttcgggagctctgtgttcatatttgttcgagctgctctggttgcaacttttggtcttgcagctgcacagaaactgttcttaaatatgctcagaagtgtgttccgagcgccaatgtcattctttgattccactcctgcaggaagaattttgaatcgggtttctattgatcaaagtgttgtagatcttgacattccttttagactcggtgggtttgcttcaacaacaatacaactctgtggcattgtcgctgtaatgaccaatgttacctggcaagttttccttcttgttgttccggtagctgttgcttgcttttggatgcagaaatattacatggcttcttcaagagaattggttcggatagttagtatccagaagtctccaataattcatctttttggagaatcaattgctggtgctgccacaataagaggatttggccaggaaaaaagatttatcaaaaggaatctttatcttctagattgttttgttcgacctttcttctgcagtatcgctgctatcgaatggctttgtttacgcatggaattactttccacacttgtatttgctttctgtatggttttactcgtcagttttccacatggaaccattgatccaagcatggcaggtcttgctgtgacatatggacttaacttgaatggacgtctatcacgatggatacttagcttttgtaagcttgaaaacaaaataatctcaatcgaaaggatttatcagtacagtcagattgtaggagaggccccagcaattatagaagatttccgcccgccttcctcgtggcctgcaacgggaacaattgagctagttgatgttaaggttcgttatgctgagaatcttccaacagtactccatggggtgagctgtgtgtttccgggtggaaaaaagattgggattgttgggcgaacgggaagcggaaagtcgactttgattcaagctttgtttcgattgattgagccaactgctggaaaaattactattgacaacattgacatttctcaaattggtcttcatgatcttcgtagtcgccttgggattatacctcaagatcctacattatttgaaggaacaatccgagcaaatcttgacccacttgaagaacattcagatgataaaatctgggaggcgcttgataaatcccagcttggagacgttgttagaggaaaagacctaaaacttgactctccagtactggaaaatggagataactggagtgtagggcagagacagcttgtgtcacttggacgagcattactgaaacaagccaaaatacttgttcttgatgaagcaacagcatcggttgacacagcaacagacaatctgatccagaagataatcagaacagagtttgaagactgcacggtctgcaccattgctcaccggataccaactgttatagacagtgacctagttttggttctcagcgacggtagagtagcagagtttgatactcctgcacggctattagaagacaaatcatcgatgttcttgaaattggtaacagaatactcctcaagatctactggaatccctgaattatga

SEQ ID NO: 29 - DNA, 459 bp, Arabidopsis thaliana
atggcgaaaggagttgcagttttgaacagcagtgagggtgttacggggactatctttttcacccaggaaggcgatggtgtgaccactgtgagtggaacagtttctggccttaagcctggtcttcatggtttccatgtccatgctcttggtgacaccactaacggttgcatgtctactggtccacatttcaaccccgatggtaaaacacacggtgcccctgaggatgctaatcgacatgctggtgatctaggaaacatcactgttggagatgatggaactgccaccttcacaatcactgattgccagattcctcttactggaccaaactctattgttggtagggctgttgttgtccatgcagaccctgatgacctcggaaagggaggccatgaactcagcctggctactggaaacgcaggcggccgtgttgcttgcggcatcattggtctccagggctaa

SEQ ID NO: 30 - DNA, 1182 bp, Arabidopsis thaliana
atggaatcttttttgttcacatctgaatccgtcaacgagggacatcccgacaagctttgtgatcagatctccgacgctatcctcgatgcttgccttgaacaagaccctgagagcaaagttgcttgtgagacttgtaccaagactaacatggtcatggtttttggagaaatcaccaccaaggctaacgttgattacgagcagattgttcgtaaaacatgccgtgagattggattcgtctctgctgacgttggtctagatgctgacaattgcaaggttctggttaacattgagcaacagagtcctgacattgcacaaggtgttcatggtcatctcaccaagaagccagaggaggttggagctggtgaccaaggtcacatgtttgggtatgctactgatgagactcctgagctcatgcctcttactcacgttctcgctactaagcttggagctaaactcactgaagttcgcaagaatggaacttgcccttggttgaggccagatggtaagactcaagtcactattgagtacatcaacgaaagcggagccatggttcctgtacgtgtccacactgttctcatctcaacacagcatgacgagactgtgactaacgatgagatcgcagctgatcttaaggagcatgtgatcaagccagtgatcccagagaaataccttgatgagaaaaccatcttccatctcaacccatctggtcgttttgttatcggaggtcctcatggagatgcagggcttaccggccgtaagatcatcatcgatacttatggtggttggggtgcacacggaggtggtgctttctctggaaaggacccaaccaaggttgacaggagtggggcttacatcgttaggcaagcagctaagagcattgtagccagtgggctagcgaggcgggtcattgtgcaagtctcgtatgccattggtgtccctgagccattgtctgtgttcgtggacagttatggaacaggaaagataccagacaaggagattcttgagattgtgaaggagagttttgatttcaggccaggtatgatctccattaacttggatctgaagagaggaggtaatggtaggttcttgaagactgctgcctatggtcactttggaagggacgatgctgatttcacctgggaggtagtcaagccactcaagtctaacaaggtccaagcttga

SEQ ID NO: 31 - DNA, 720 bp, Arabidopsis thaliana
atggcaaatatctccagtattcacattctcttcctcgtgttcatcacaagcggcattgctgttatggccacagacttcactctaaggaacaattgccctaccaccgtctgggccggaactctcgccggtcaaggacccaagctcggcgatggaggatttgaattgactccaggtgcttcccgacagctcacggctcctgcaggatggtcaggccggttctgggctcgtacaggctgcaactttgacgcctccggaaacggtagatgtgtaaccggagactgtggcggtctaagatgtaacggcggcggagttcctcccgtcactctggctgaattcactctagtaggcgatggcggcaaagatttctacgatgtgagcctcgtagatggttacaatgtcaagctggggataagaccatccggaggatcgggagattgcaaatacgcaggctgtgtctctgacctcaacgcggcttgccccgacatgcttaaggtcatggatcagaacaatgtcgtggcctgcaagagtgcctgtgagaggtttaatacggatcaatattgctgccgtggagctaacgataagccggaaacttgtcctcccacggactactcgaggattttcaagaacgcttgccctgacgcctatagctacgcttatgacgacgaaacgagcaccttcacttgtaccggagctaactacgaaatcactttctgcccttaa

SEQ ID NO: 32 - DNA, 2691 bp, Arabidopsis thaliana
atgtattgtagagagtccttgtcgagtctccagactttgaacgtagcaaagagtctcagctctttgttccctaaacaatcagctctcatcaacccgatctccgctggacgtcgaaacaacctgcctcgtccaaacctcagaagacgatgtaaggtcaccgcttcacgggctaatattgaacaagaaggtaacacagtgaaagaacccattcagaatattaaagtaaagggatacataacggcccaagaagagtttctggagggcataacttggtcgagaggtctcgatgacattgctgatatccgcggcagatcattgctcgtcgagcttattagcgccaagactgaccagcggattacggtagaagactacgcacaacgtgtatgggccgaagcccctgatgagaagtacgagtgcgagtttgagatgcctgaagactttggaccagtgggagccatcaagattcagaaccaataccatcgacagttgttcctcaagggggtagagcttaaattacccggcgggtcgataacgtttacatgtgagtcatgggtggcccccaagtccgttgacccaaccaagcggatattcttctccgacaagtcctacttgccttcccaaacaccagagcctcttaaaaagtatcgaaaagaggagctcgagaccttacaaggcaagaaccgcgaggaagttggtgaatttaccaagtttgagcgcatttacgactatgatgtgtacaacgatgttggtgaccctgacaatgatcctgaacttgctcgtccggtaattggaggcctcacacatccatatccaaggcgttgcaagaccggtcgaaaaccttgtgagactgacccctcttcagagcaacgctacgggggagagttctatgtaccaagagacgaggagttctctacagccaagggcacttcattcacaggcaaggccgtactggcagctcttccctccatcttccctcagatcgagtctgttctattgagtccccaagaaccttttccacacttcaaggccatacaaaatctctttgaagaaggcattcagcttcccaaggatgctggcctcttacctctgctccccagaatcatcaaagctcttggcgaagctcaagatgatattctccagtttgatgccccagttctcattaacagggatagattttcatggttacgagacgacgagtttgctcgccagacacttgccggccttaatccttatagcattcagctagttgaagagtggccgttaataagcaaactagacccggccgtttatggtgatcccacctcactcattacttgggaaattgtggaaagagaagttaaaggaaacatgacagttgatgaggctctaaagaataagagattgttcgtgttggattatcatgatttgcttctaccatatgtgaacaaagtgagagagttaaacaataccacattatatgcttctagaacactattcttcctcagcgatgatagcacattgaggcctgttgccattgagttgacttgtccaccaaatatcaacaagccccaatggaaacaagtcttcacgccaggctatgatgctacgtcatgctggctatggaatcttgctaagactcatgctatctctcatgacgccggttatcatcagcttatttcccattggttgaggactcatgcctgtacggagccatacataatagcggcaaatagacaactaagtgccatgcatcccatttataggcttttgcatcctcatttccgctacaccatggaaatcaacgctcgtgcacgccaaagtcttgtcaacggaggtggaatcattgagacttgtttctggcccgggaagtatgcattagagctaagttcagccgtctatggtaaactatggaggtttgaccaggaaggcttacccgcggatctcatcaaaagggggttggctgaggaagataagaccgcagaacatggagtacgtctgacgataccagactatccatttgcaaatgatggtctaatattgtgggatgcaattaaagaatgggtgacagactatgtgaaacattactatcctgatgaagaactgatcacatcggacgaggaactccaaggatggtggagtgaagtgcggaacataggccacggagacaagaaagacgaaccttggtggcctgtcctcaaaacacaagatgacttgattggtgtggtaactacgattgcatgggtcacctcaggtcaccatgcagctgtaaactttggacagtacggatatggaggatactttcccaaccgaccaacgacaacaaggataagaatgccaacggaagatccgacagatgaagccttaaaagagttctatgagtcgccagaaaaagtgttgcttaagacatacccatcgcagaaacaggcgaccctagtgatggtcacgttggatcttttatcaacacattcacctgacgaagagtacattggagaacaacaagaagcatcttgggccaatgagcctgttatcaatgctgcatttgaaagattcaaaggcaagctccaatatctagaaggagtgatagatgagagaaacgtgaacattactctaaagaatagagctggagctggtgttgttaagtatgagcttttgaagcctacctctgagcatggtgttaccggaatgggtgttccttatagtatttctatttga

SEQ ID NO: 33 - DNA, 1314 bp, Arabidopsis thaliana
atggcctctctattctcttcagttctcttgtctctttgtttactctcttcactttttctctcaaatgcaaacgctaagccaaaactaggcttcaccgcggatctaatccaccgtgattctcctaaatcgccgttctataacccgatggaaacctcttcccagcgtctacgaaacgcgatccaccgatccgttaaccgtgttttccatttcactgaaaaggataacacaccacaaccacagattgacctcacctcaaatagcggtgaatatctcatgaacgtatccattggaacacctcctttcccgatcatggccatcgccgacaccggaagtgatctcctctggacgcagtgcgcaccatgcgatgattgttacactcaagttgatcctctctttgaccctaaaacgtcttccacatacaaagacgtttcttgctcctcaagtcaatgtactgccctagaaaatcaagcctcttgttccacaaatgacaacacttgttcttactcattgtcttacggggataactcatacacaaagggtaacatcgccgtggataccttaacgctcggctccagcgatacccgccctatgcagcttaagaatattattatcggttgtggtcacaacaacgctggaacgtttaacaagaaaggctctggaatcgtcggactaggtggtggtccggtttcgcttatcaagcaacttggcgactccatcgacggtaaattctcatactgcttggttcctctaacttccaaaaaggatcaaacgagtaaaatcaacttcggaaccaatgccatcgtgtcgggatcaggagttgtctcaactcctctgatcgcaaaggcgtctcaagagaccttctattacctaaccctaaaatccattagcgtgggaagcaagcaaatccaatactcaggctcagattctgaaagcagcgagggaaacatcatcatcgattcaggcacaactttaacgttattaccgactgaattttactccgagctcgaggatgcggttgcatcctctatcgatgctgagaagaagcaagatccacaaagcggtttgagtctatgttacagtgcaaccggagatctaaaagttccagtcattactatgcattttgatggagccgatgtgaagcttgactcctccaatgcctttgtacaagtctcggaggatttggtttgctttgccttccgcggaagcccgagtttctccatatacggtaatgtggcgcagatgaactttcttgttggatacgacactgtttccaaaacggtgtcatttaagccaacagattgtgcaaagatgtag

SEQ ID NO: 34 - DNA, 1188 bp, Arabidopsis thaliana
atggtgatggctggtgcttcttctttggatgagatcagacaggctcagagagctgatggacctgcaggcatcttggctattggcactgctaaccctgagaaccatgtgcttcaggcggagtatcctgactactacttccgcatcaccaacagtgaacacatgaccgacctcaaggagaagttcaagcgcatgtgcgacaagtcgacaattcggaaacgtcacatgcatctgacggaggaattcctcaaggaaaacccacacatgtgtgcttacatggctccttctctggacaccagacaggacatcgtggtggtcgaagtccctaagctaggcaaagaagcggcagtgaaggccatcaaggagtggggccagcccaagtcaaagatcactcatgtcgtcttctgcactacctccggcgtcgacatgcctggtgctgactaccagctcaccaagcttcttggtctccgtccttccgtcaagcgtctcatgatgtaccagcaaggttgcttcgccggcggtactgtcctccgtatcgctaaggatctcgccgagaacaatcgtggagcacgtgtcctcgttgtctgctctgagatcacagccgttaccttccgtggtccctctgacacccaccttgactccctcgtcggtcaggctcttttcagtgatggcgccgccgcactcattgtggggtcggaccctgacacatctgtcggagagaaacccatctttgagatggtgtctgccgctcagaccatccttccagactctgatggtgccatagacggacatttgagggaagttggtctcaccttccatctcctcaaggatgttcccggcctcatctccaagaacattgtgaagagtctagacgaagcgtttaaacctttggggataagtgactggaactccctcttctggatagcccaccctggaggtccagcgatcctagaccaggtggagataaagctaggactaaaggaagagaagatgagggcgacacgtcacgtgttgagcgagtatggaaacatgtcgagcgcgtgcgttctcttcatactagacgagatgaggaggaagtcagctaaggatggtgtggccacgacaggagaagggttggagtggggtgtcttgtttggtttcggaccaggtctcactgttgagacagtcgtcttgcacagcgttcctctctaa

SEQ ID NO: 35 - DNA, 1161 bp, Arabidopsis thaliana
atgaacgcagcgcttgcaacaaccaccgccacaactcccgtactccgccgtgagacgcctcttcttcattattgttctctcacaacaaaatcgccggtttaccaaatcaacagagttagattcggatcttgcgtgcaaacagtcagcaagaaattcttgaaaatctcggcgagctctcagagcgcttcagcggcggtcaatgtcacggcggatgcttcgattccgaaagagatgaaggcgtgggtgtatagtgactacggcggagttgatgttctgaagctggagagtaacattgttgtgccggagattaaagaagatcaggttttgattaaagttgttgcggcggctcttaatcccgtcgatgctaagagacggcaagggaaatttaaagccactgattcgcctctcccgactgttccgggatacgacgttgccggagtagtggtgaaagtgggaagtgcggtgaaggatttgaaagaaggagatgaagtttatgctaacgtgagcgagaaagcattggaaggtccaaagcagtttggttctttagcggagtacacggccgtggaagagaagttattagctttaaaacctaaaaacatcgattttgcgcaagctgcagggcttccgttggcgatagaaaccgctgatgaaggtttagttaggactgaattctcagccggaaagtcaattcttgttcttaatggtgccggaggagtagggagtcttgtgattcagttggcgaagcacgtgtatggagcttcaaaagtagctgcaactgcgagtacagaaaagctagagctagtgagaagcttaggtgctgatttagctattgattacacaaaggagaatatagaagacttgcctgacaagtacgatgttgtctttgacgccattgggatgtgtgataaggcagtgaaggtgattaaggaaggagggaaagttgtggcattgactggagctgtcacgcctcctggttttcgattcgttgttacatctaatggcgatgttttgaagaaacttaacccatatattgagagtgggaaggtgaagcctgtggttgatcccaaaggaccgttcccattctcacgcgttgctgatgctttttcatacttagaaacgaaccatgccacagggaaggtcgttgtttatcccattccttaa

SEQ ID NO: 36 - DNA, 2178 bp, Arabidopsis thaliana
atggagattaacggggcacacaagagcaacggaggaggagtggacgctatgttatgcggcggagacatcaagacaaagaacatggtgatcaacgcggaggatcctctcaactggggagctgcagcggagcaaatgaaaggtagccatttggatgaagtgaagagaatggttgctgagtttaggaagccagttgtgaatcttggtggtgagactctgaccattggacaagtggctgcgatctcaactattggtaacagtgtgaaggtggagctatcggagacagctagagccggtgtgaatgctagtagtgattgggttatggagagtatgaacaaaggcactgatagttatggtgttactactggttttggtgctacttctcatcggagaaccaaaaacggtgtcgcacttcagaaggaacttattagattccttaacgccggaatattcggaagcacgaaagaaacaagccacacattgccacactccgccacaagagccgccatgcttgtacgaatcaacactctcctccaaggattttccggtatccgatttgagattctcgaagcaattaccagtttcctcaacaacaacatcactccatctctccccctccgtggtacaatcaccgcctccggagatctcgttcctctctcctacatcgccggacttctcaccggtcgtcccaattccaaagctactggtcccaacggtgaagctttaacagcagaggaagctttcaaattagcaggaatcagctccggattctttgatctccagcctaaggaaggtctcgcgctagtcaatggcacggcggttggatctggaatggcgtcaatggtgttattcgaaacgaatgttctctctgttttggctgagattttgtcggcggttttcgcagaggtgatgagtggtaagcctgagttcaccgatcatctcactcacagacttaaacatcatcccggtcaaatcgaagcggcggcgataatggagcatatcctcgacggaagctcgtacatgaaattagctcagaagcttcacgagatggatccgttacagaaacctaaacaagatcgttacgctcttcgtacttctcctcaatggttaggtcctcaaatcgaagtgatccgttacgcaacgaaatcgatcgagcgtgagattaactccgtcaacgataatccgttgatcgatgtttcgaggaacaaggcgattcacggtggtaacttccaaggaacaccaatcggagtttcaatggataacacgagattggcgatagcagcgattggtaaactcatgtttgctcaattctcagagcttgtgaatgatttctacaacaatggtttaccctcgaatctaaccgcttcgaggaatccaagtttggattatggattcaagggagctgagattgcaatggcttcttattgttcagagcttcaatacttagctaatcctgtgactagccatgttcaatcagcagagcaacataaccaagatgtcaactctttgggactaatctcgtctcgcaaaacttctgaagctgttgatattctcaagcttatgtcaacaacgttcctcgttgcgatttgtcaagctgtggatttgagacatttggaggagaatttgagacagactgtgaagaacactgtctctcaagtggcgaagaaagttcttactactggagtcaatggtgagcttcatccttctcgcttctgcgaaaaggatttactcaaagttgtagaccgtgaacaagtctacacatacgcggatgatccttgtagcgcaacgtacccgttgattcagaagctgagacaagttattgttgaccatgctttgatcaatggtgagagtgagaagaatgcagtgacttcaatcttccataagattggagctttcgaggaggagcttaaggcagtgctaccgaaagaagtggaagcagcaagagcagcctacgataacggaacatcggctatcccgaacaggatcaaggaatgtaggtcgtatccattgtatagattcgtgagggaagagcttggaacagagcttttgaccggagagaaagtgacgtcgcctggagaagagttcgacaaggttttcacggcgatttgtgaaggtaaaatcattgatccgatgatggaatgtctcaacgagtggaacggagctcccattccaatatgttaa

SEQ ID NO: 37 - DNA, 2526 bp, Arabidopsis thaliana
atggcaaacgccaatggaaaagctgcgactagtttaccggagaaaatctcggctaaggcgaatccggaggccgatgatgctacggagatcgctgggaatatcgtctaccacgccaagtacagtccacatttctctccattgaagttcgggcctgagcaagctctctacgctaccgcagagagtcttcgcgatcgtctcattcagctgtggaatgagacttatgttcattttaacaaagttgatccaaaacaaacttattacttgtcaatggagtatctccaaggtcgtgctttgaccaatgccattgggaatttgaaccttcaaggtccatatgctgatgcactgcgtacgctgggttatgagcttgaggagatagctgagcaggagaaagatgcagctctaggaaatggtgggttagggagacttgcctcgtgtttcttggattcgatggccaccctaaatctgcctgcttggggttatggtttgaggtacagacatgggttgtttaagcaaataatcacaaagaaaggtcaagaagagattccagaggactggcttgagaaattcagcccatgggaaattgtgaggcacgacgtggtattccctgtcagatttttcggcaaggtgcaagtaaatccggatggatcaaggaaatgggtagatggtgatgttgtacaagctcttgcttatgacgtgccaatcccgggatatggcacaaagaacacaatcagtctccgtctctgggaagcaaaagctagagctgaggatcttgatctttttcagttcaacgaaggagaatatgaattggctgcacagcttcattctcgagctcaacagatttgcactgttttatatccaggagatgctaccgagaatgggaagttattacggttaaaacagcagttctttctctgcagtgcttcgcttcaggatattatatcaagatttcacgagaggagcaccactgaaggcagccggaaatggtcagagtttccaagtaaagttgctgttcaaatgaatgacacacacccaactcttgcaatacctgagctcatgcgattgctaatggatgacaatggacttggatgggatgaggcttgggatgtgacatcaaagaccgttgcttacaccaatcacactgtccttcctgaagcgttggagaaatggtcacaatctttgatgtggaagcttcttcctcgtcatatggaaataatagaagagattgacaagaggtttgttcaaaccattcgcgatacaagagttgatctggaggataagatttcaagtttgagcatcttagataacaatccacaaaagcctgtggtgagaatggctaacttatgtgttgtatcctcgcatacggtgaatggcgttgctcagttacacagtgatatcttgaaggctgagttattcgcagactatgtctctatatggccaaacaagtttcaaaacaagactaatggcatcacacctcgaaggtggttacgtttctgcagccctgagctcagtgatataatcacaaagtggttaaagactgacaaatggattaccgatcttgacctacttaccggtcttcgccagtttgcggacaatgaagaactccaatctgaatgggcttctgcaaagacagccaataagaaacgtttggctcaatatatagagcgtgtgactggtgtgagtatcgatccaacaagcttatttgacatacaagttaagcgtatccacgaatacaagaggcagctgatgaacattcttggagtagtatacagattcaagaaactaaaggagatgaagcctgaggagaggaagaaaacagttcctcgtactgtcatgattgggggtaaagcatttgccacctatacaaatgcaaaacggatagtgaagctggtgaatgatgttggtgatgttgttaacagcgatccagaggtcaacgaatacctaaaggtggtatttgttccaaactacaatgtcactgtagcggagatgctaatacccggaagtgagctatctcaacacatcagcacagcaggcatggaggcaagtggtaccagcaatatgaaattcgctctcaacggttgtcttattataggaacccttgatggggctaatgttgagataagagaggaggttggcgaagaaaatttctttctttttggtgcaacggccgatcaggtccctcgactgcgtaaagaacgagaagacggactgttcaaacccgatcctcggttcgaagaggcaaagcagtttgtcaaaagtggagtgtttgggagctacgattatggtccactccttgattctcttgagggtaacacaggttttggacgtggtgattacttcctggttgggtatgacttccccagctacatggacgctcaggccaaagttgacgaagcttataaggaccggaaggggtggctgaaaatgtcgatattgagcacagccgggtcaggaaagttcagcagtgaccgtacaatagctcagtatgccaaagagatttggaacattgaggcttgtcctgttccctaa

SEQ ID NO: 38 - DNA, 909 bp, Arabidopsis thaliana
atgaccaacatgactcttcgcaagcatgttatatactttcttttcttcataagctgctctcttagcaaaccctccgatgcatccagaggtggcatagccatctattggggccaaaacggaaacgaaggtaacctctctgccacgtgtgccaccggccggtatgcttacgtcaacgtcgcctttcttgtgaaattcggaaatggccaaacaccggagctcaaccttgccggccactgcaaccctgcggcgaacacttgcacccattttggctctcaggtcaaagattgtcagtctcgtggcatcaaggttatgttgtctctcggcggcgggattggaaactactcgattgggtcgagggaggacgcaaaagttatcgctgattatctgtggaacaacttcttgggaggaaaatcatcatcacgtcccttaggtgatgctgttctagatggtatcgatttcaatatcgagcttggctctcctcaacactgggatgatctcgccaggactctctcaaagtttagccacagaggaagaaaaatatatctaacaggagctcctcaatgtccatttccagacagattaatgggaagtgctctcaacactaaacgttttgactatgtttggattcaattctacaataatccaccgtgttcatacagttcaggtaatactcaaaacctcttcgattcatggaacaagtggaccacttcaatcgcagcccaaaaattcttcttgggtctaccggcagctcctgaagctgccggaagtggctatatcccaccagatgtactgacttcacagattcttccgactttaaagaagtctaggaagtatggaggtgtaatgctttggtctaaattctgggatgataaaaatggatacagttcatctatattggctagtgtgtga

SEQ ID NO: 39 - DNA, 1452 bp, Arabidopsis thaliana
atggagaacggtgagaaagcagctgagactgtcgttgttgggaactatgttgagatggagaaggatggtaaagctttagacatcaaatctaagctatctgacatgttttggcatggtggctctgcttatgatgcttggttcagctgtgcttccaatcaggtggcacaagtgctgttgacactgccatactcgttctcacagctggggatgctctcagggattctgtttcagctcttttatggcatcttaggtagttggactgcttacctcatcagtattctctatgttgaatacagaaccagaaaggaaagagagaaagttaacttcagaaaccatgtcattcagtggtttgaggttcttgatggattgcttgggaagcattggaggaatgttggtttagcctttaactgcaccttccttctctttggatctgtcattcaactcatagcttgtgccagcaacatatattacataaatgataatctggacaagaggacatggacatacatatttggagcatgttgtgcaaccacagtctttattccttccttccacaactacaggatctggtcttttcttggactcttgatgaccacttacactgcttggtacctcaccattgcctctatcctccatggacaggtagaaggagtgaagcattcaggaccaagcaagctggttttatacttcacaggggccacaaacattctttacacattcggtggacatgctgttactgtagagataatgcatgctatgtggaaacctcagaagttcaagtccatatacctgtttgcaacactctacgtgctgacgctaacgctgccttctgcgtctgcggtttattgggcgtttggtgatttgcttctaaaccattcaaacgcatttgctcttctcccaaagaatctttaccgtgactttgcagttgtgcttatgctcatccatcagttcatcacctttggttttgcttgcacgccactctactttgtgtgggagaagctaatagggatgcatgagtgcagaagcatgtgtaaacgagccgctgcgaggctccctgtcgttatacccatttggtttcttgctatcatattcccgttctttggtcccattaactcaaccgtaggatctcttctcgtcagcttcactgtctacatcatcccagcactagctcacatcttcaccttccgctcatccgccgcacgtgaaaacgctgtggagcagccaccaaggtttctaggacgatggactggggcattcacgatcaatgccttcatagttgtgtgggtgttcattgttggattcgggttcggtggttgggctagtatgatcaattttgtacaccagattgacacctttggcctcttcaccaaatgctaccaatgcccaccaccggttatggtctcacctcctccaatcagccatcctcacttcaatcacactcacggcctttga

SEQ ID NO: 40 - DNA, 885 bp, Arabidopsis thaliana
atgacgaaatctgcaactctattccttctctttctcactatctcagccttcactgatggagctcagcttataatagtgaataactgccaggagagcatttggccgggaattctcggcggcggaggccaaatcacaccaagaaacggcggattccacatgggaagcggcgaagaaaccatcatagacgtaccggataaatggtccggtcgaatctggggtagacaaggctgcacctttaaccaaaacggtaaaggctcatgccaaaccggagactgcaacgacggctctatcaactgccaaggaaccggcggtgtaccaccagcaaccgtagtagaaatgacattaggctcatcttcctctccgcttcatttctacgacgtaagtctcgtcgacggtttcaatcttccggtgtcgatgaaaccaatcggcggtggagttggatgtggcgttgcggcttgtgaagtgaatttgaacatttgttgtccatcagctttggaagttaagagagatgggaaagtggttggttgtaaaagtgcttgcttggcgatgcaatcggctaagtattgttgcaccggtgaatatgcgaatcctcaggcgtgtaagccgactctgttcgcgaatctgtttaaagcgatttgtcctaaagcttatagttatgcgtttgatgattctagtagtttgaataagtgtagagcttctcgttatgttatcactttctgtcctccaaagtcattgaatgagaaactgagaaaatttgaactcaaaatagaatcaaaatttggtcattatacagtggttaccatccttttaactagtgttctaaagacacaagctttagctggtgggtccaaagacataaaagacggttttagtgcttactcatga

SEQ ID NO: 41 - DNA, 975 bp, Arabidopsis thaliana
atggcggcgatagaggacagtccaacgttttcctctgtggtaactccggcggcttttgagataggcagcctcccgacaaccgagataccggtggatccggtggaaaatgattcaacagcaccgccaaaaccggtgagaatcacctgtccaacagtcgccggaacttatcccgtcgttttattcttccatggcttttatcttcgcaactacttctactctgacgttcttaaccacatcgcttcgcatggttacattcttgtagccccacagttgtgcaaattattgccgccgggagggcaagtggaagtggacgatgctggaagtgtgataaactgggcatcggaaaacctcaaagctcacctaccaacttcggtaaatgctaatggaaaatacacctcactcgtgggccacagccgcggtgggaaaacggcgtttgcggttgcgctaggccatgccgcaacattagacccatccatcacgttttcagctctaataggaattgatccagtcgcaggaactaacaaatacattagaaccgatccgcatatcttaacgtataaaccggaatctttcgagctggacataccggttgcagtggtgggaaccggactcggaccgaagtggaacaacgtgatgccaccatgcgcaccaacggacttaaaccatgaggagttttacaaagagtgtaaggcgacgaaagcccatttcgtggctgcggattacggacatatggatatgttggacgatgatttgcccggttttgttgggtttatggccggttgtatgtgtaagaatgggcaaagaaaaaagtctgagatgaggagctttgtaggtggaattgtggttgcgtttctcaagtatagtttgtggggtgaaaaagcggagattcgattgattgtgaaggatccttccgtttctccggccaagcttgatccttcacctgagttggaagaagcttctggtatcttcgtctag

SEQ ID NO: 42 - DNA, 1125 bp, Arabidopsis thaliana
atggaaatggtaaacgcagaagcaaaacagagtgtccctcttctcaccccttataagatgggaagattcaatctttctcatagggttgttctagcaccattgacgagacagaaatcgtacggaagcgttcctcagcctcacgctatcttgtattactctcagagaacgtcaccgggaggttttctcatcgctgaagccaccggggtttcagatacagctcaagggtatccagatacacctgggatatggactaaagagcatgtggaggcatggaagccaatcgttgatgctgtacatgccaaaggtggtatcttcttctgtcagatctggcatgttggccgcgtttctaatcgcggttttcagccaaggaggcaagctcctatctcttgtacggggaagccaattatgcctcaaatgcgtgctaatggcattgatgaagctcgctttacccctccaagacgtctaagtatcgaagaaatccccggcattgtcaatgattttaggcttgctgcaagaaatgctatggaagctggttttgatggagttgagattcatggagctcatggctatctgattgatcagttcatgaaggacaaagtgaatgacagaactgatgaatatggtggatcattgcaaaaccgttgcaaatttgctctggaagtagtcgatgcagtggctaaggagatcgggccagaccgtgttggaatcaggctctctccgtttgcagactatatggaatccggagacactaatccagaagcattagggctgtacatggtggaatctctgaacaaatatggaatcctctactgtcatatgattgaacccagaatgaaaacagtgggagaaatagcagcgtgttctcacacactaatgccaatgagggaagcctttaaggggactttcatctctgcaggaggtttcacgagggaagatgggaatgaggccgtggcaaagggacgaactgatcttgtggcttatggtcgatggtttctagccaacccagacctgccaaagcggttccaactggatgcaccgctgaataaatacaataggtcaacgttttacacttctgatcctgtcgtgggttacaccgattacccttcccttgaatcaacagcttaa

SEQ ID NO: 43 - DNA, 822 bp, Arabidopsis thaliana
atgttgactcccaccatttctaaatccatctctttagtaaccattctattagttctacaagctttctctaacacaacaaaggctcaaaattgcggttgttcgtcagagctatgttgtagtcagtttggcttttgcggtaacacttcagactattgtggtgtaggttgccaacaaggaccttgttttgctcctccccctgcaaatggtgtctctgtggctgagattgtaacgcaagaattcttcaatggaatcatcagtcaagccgcgtctagttgcgccggcaatagattttacagtcggggagcttttcttgaggccttagactcatattctcgtttcggtagagttggatcgaccgacgactctaggcgtgagattgcagcgttctttgctcatgtcacacatgaaacaggacatttctgctacatagaagagatagacggagcctcaaaggattactgcgacgagaatgcaacacaatatccatgcaatcctaacaaaggctactacggccgcggaccgatccaactctcttggaatttcaactacgggccagccgggacagcaattggtttcgacggcctgaatgcaccggaaacagtagccacggatccagtcatatccttcaaaaccgccttgtggtactggaccaatagggttcagcctgttatctctcaaggttttggtgcaacaatccgtgccattaacggtgctttggagtgtgacggggccaacacagccaccgttcaagctagagttcgttactacacggattattgtcgtcaacttggcgttgatcctggaaacaacctcacttgctaa

SEQ ID NO: 44 - DNA, 429 bp, Arabidopsis thaliana
atggaaatgatactgatctcgtcatcgacactcaggttccatccattgaggacatcacaaagaatcgccaccggaaccaatagaagacgaaccaccaccgtgtgtgcagactactacagaggaggaagaacggtggacgagaacatggtggtccttaggaaacgaatccatgagatgaagatggttgaacgcaactttgaacctccttctcattggatgcaatgggagaaacgtttctactgcaactacgacgctactatatgtgatgcactcactcttctccaaacttttctcatgaactctcgtcccagcgtcgcgtttggaacgtgtcttcttctcctcgtcagcgttcccgtctcctccgccgtttttgcttttcgcatccttgatctagctctttggcttttggacgccgttcacgtagtatga

SEQ ID NO: 45 - DNA, 1194 bp, Arabidopsis thaliana
atggaaaacggagaagcaaaacagagtgtacctcttctcactccctataagatgggaagattcaatctttcccatagggttgttctagcaccattgacgagacagagatcgtacggaaacgttcctcagcctcacgctgccatatattactctcagagaacgactccaggaggttttctcatcactgaagccactggagtttcagatacagctcaaggatatcaagatactcctgggatatggactaaagagcatgtggaggcatggaagccaatcgttgatgctgtacatgccaaaggtggtatcttcttctgtcagatctggcatgttggccgcgtttctaatagcgggtttcagccaaatggaaaagctcctatctcttgttcggataagccattgatgcctcaaattcgctctaatggcatcgatgaagctctctttacccctccaagacggcttggtatcgaagaaatccccggcattgtcaatgattttaggcttgctgcaagaaatgctatggaagctggtaagcacattttggatttggaattcaagaagctgaaaccattcaagattcttatatgtgtccttgttgttgcaggttttgatggagttgagattcatggagctaatggctatctgattgaccagttcatgaaggatacggtgaatgatagaactgatgaatacggtggatcattgcaaaaccgttgcaaatttcctctagaaatagtcgatgcagttgctaaggagatcggaccagaccgtgttggaatcaggctctctccatttgctgactacatggaatctggagacactaatccaggagcattagggctttatatggcggaatctttgaacaaatacggaatcctctactgtcatgtgattgaagcgagaatgaaaacaatgggagaagtacatgcttgtcctcacacactaatgccgatgaggaaagcgtttaaggggacttttatctccgcaggaggtttcacgagggaagatgggaatgaggctgtgtcaaagggaagaactgatttggtggcttatggtcgatggtttctagccaacccggacctgccaaagaggttccaagtggatgcaccgctgaataagtacgatagaccaacgttttacacttctgatccagtcgtcggttacaccgattaccctttcctcgaatcaacagcttaa

SEQ ID NO: 46 - DNA, 693 bp, Arabidopsis thaliana
atgaagattcttctagcatcattgtgtttgatcagtcttctcgtaatcttgccttctgtcttctctgcttcttcttcctctgaagattttgatttcttctacttcgtccaacaatggccaggatcatactgtgacacacagaagaagtgttgttatccaaattcaggcaaaccagctgctgattttggcattcatggtctttggcctaactacaaagatggaacttatccatctaactgtgatgcctctaaaccattcgatagctcaacgatatcagatcttctcacttcaatgaagaagagctggccaacactggcttgcccaagcggttcaggtgaagcgttttgggagcacgaatgggagaagcatggtacttgctctgaatcggttatcgatcaacatgaatatttccaaaccgctcttaaccttaaacagaaaaccaatctccttggagctctaaccaaagccgggattaatccggatggaaaatcttactctttggagagcataagagattcgataaaagagtcaattggtttcactccttgggttgagtgtaacagagatggttctggtaatagccaattgtaccaagtctatctttgtgttgaccggtctggttccggtttaatcgaatgtccggttttcccacatgggaaatgtggagctgagatcgaattcccttctttttag

SEQ ID NO: 47 - DNA, 978 bp, Arabidopsis thaliana
atgttgactagatttaagaaacaaaataataagatggttagggcaaatatagtgagcatggttctgttgatgcatgccatcgttgggtttccttttcatgcgaggggattaagtatgacttactacatgatgagctgtcctttcgctgaacagattgtgaagaacagtgttaacaatgctcttcaagccgatcccactttagccgctggtcttatccgtatgttgttccacgactgtttcatcgagggatgtgatgcgtcaattctgctagattcaacgaaagacaacactgcggaaaaggattcgcctgcgaatctgagtctacgtggctacgagatcatcgatgatgcaaaggagaaaatcgagaatagatgtccaggagttgtatcatgcgcagatatagttgccatggctgctagagatgctgtcttttgggctggtggtccatattatgacataccgaaaggaaggtttgatggtaaaagatcaaagatagaagatacaagaaatctaccttcaccttttcttaatgcctctcaactcattcaaacttttggccaacgtggtttcactccacaagatgttgttgctctctctggagcacataccctaggagttgcacgatgctcctccttcaaggctagacttaccgtcccagactcttcattagactcgacttttgcaaacactctctctaaaacatgcagcgcgggtgacaatgcagagcaaccctttgatgctacgcgcaacgatttcgacaatgcttacttcaatgcgcttcagatgaaatcaggagtcctcttttcagaccaaactttattcaacacaccaaggaccaggaatcttgttaacggctatgcacttaaccaagccaagttcttctttgatttccaacaggccatgcgcaagatgagcaatcttgatgttaaacttggctctcaaggtgaagtccgtcaaaattgtcggagtattaattag

SEQ ID NO: 48 - DNA, 975 bp, Arabidopsis thaliana
atggcttcaaataaacttatttcgattctagttctcgtagttacacttttactccaaggtgataacaattacgtcgtcgaagcacaactcacgactaacttctactcaacctcttgccccaacctcctctccaccgtccaaaccgccgttaaatctgccgttaacagcgaggctcgaatgggtgcatctatcctccgtctcttcttccacgattgctttgtcaacggatgcgacggttcgattctactagacgatacgtcaagcttcacaggagaacaaaacgcggctccaaaccgcaattcagctcgtgggtttaatgtgatcgacaacatcaaatcagcggttgagaaagcatgtcccggggttgtgtcttgtgctgatatcttagccattgctgctagagactccgtcgtagcccttggaggaccgaactggaatgtgaaagtaggaagaagagatgcaagaacggcgagtcaagcggcagcgaatagtaacattccggcaccgacttcgagtctgagccaactcattagtagtttcagtgctgttggactctccaccagagatatggttgctctctctggcgcacacacgatcggacaatcccgttgcacgaacttccgagcgagaatctacaacgagacaaacatcaatgccgccttcgccacgacacgtcaacgaacttgccctagagcctccggttccggcgacggaaacctagctccactagacgtcaccacggcagcttctttcgacaacaactacttcaagaatctcatgactcagagagggctcctccattccgaccaagtgctcttcaacggcggctctactgactccatcgtccgtggatacagcaacaatccgtcgagctttaactctgacttcacggcggcgatgataaaaatgggtgatatcagcccgttgactggtagtagcggtgaaatccgcaaggtttgcgggaggaccaactga

SEQ ID NO: 49 - DNA, 981 bp, Arabidopsis thaliana
atgacgagattcggattagctcttttgatgattcttgtgattcaagggcttgtgaccttttcagaagcacaattgaagatgggattctacgaccaaacgtgcccttacgcagagaagatcgtacaagatgttgtcaaccaacatataaacaatgcaccctctttggctgctggcctaattaggatgcattttcatgactgcttcgttcggggttgtgatggttccatcttgatcaacgcgacatcgagcaaccaacaagtggagaagcttgctcctccgaatctaactgtgagaggtttcgattttatcgataaagtaaagtctgctctagaatcaaagtgccctggaatcgtctcttgcgctgatatcatcacacttgctactagagactctattgttgctattggtggaccgacatggaacgttccaacggggcgcagagacggacgtatctctaactttgccgaggctatgaacaatattcctcctcctttcggaaacttcacgactctgataaccctctttggaaaccaaggacttgatgttaaagacctcgtcttgttatccggtgcccacacgattggagtgtctcattgctcctccttctcaaaccgtctcttcaatttcaccggcgttggagaccaagatccatcgctcgacagcgaatatgccgacaatctcaaatcacggagatgtttatctatcgctgacaataccacaaaagtcgaaatggatcccggtagtcgaaacaccttcgatcttagctactaccgtcttgtcctaaaacgtcgtggactttttgagtctgacgctgcattgactatgaatcctgcggcattggctcaggtcaaacgcttcgccggaggatcggagcaagagttctttgctgagttctccaactccatggagaaaatgggaaggattggggtcaaaacagggtcggatggggagattcgaagaacatgtgcatttgttaactaa

SEQ ID NO: 50 - DNA, 2019 bp, Arabidopsis thaliana
atggctgctaaacctcttcttcttcctcttctcctccttcttcatctctcaatcaccttagctcaaaacgacacaaatgctctcacactcttccgtctccaaaccgacacacacggcaacctcgccggaaactggaccggctccgacgcttgtacctcctcatggcaaggcgtttcttgctcaccatcttcacaccgcgtcactgaactatctctcccttccctctccttacgaggaccattaacctctctctcctccttagaccaacttcgtcttcttgacctccacgataacagactcaacggcaccgtttcaccactcacaaactgtaaaaacctcagactcgtttatctcgccggtaacgatctctccggtgagattcctaaagagatatcctttcttaaacggatgatacgtcttgatctctctgataacaatatccgtggagttataccaagagagattctcgggtttacccgggttttaacgatccggatccagaacaatgagttaacgggtcggatcccggatttttctcagatgaagtcacttcttgaattgaatgtttccttcaatgagttgcacggaaacgtctccgacggcgtggtgaagaaatttggagacttgagcttttccggtaacgaaggattatgcgggtcggatcctttaccggtttgtactatcacaaacgacccggaatcttctaacactgatcagattgttccgtcgaatcctacttcgattccgcattctccggttagcgttagagaaccggaaattcacagtcatagagggattaaaccgggaataatcgctgcggttatcggtggttgcgtggcggttattgttttagtatcttttggttttgctttctgttgtggaagattagaccgtaacggcgaaagatcaaaatccggaagtgtagagactggtttcgtcggaggaggagaagggaagagacgaagcagttacggagaaggaggagagagtgatgcgacgtcggcgacagataggagcagacttgtgtttttcgagaggaggaaacagtttgagcttgatgatttgttgaaagcatctgcggagatgcttgggaaagggagtttagggacggtgtacaaggcggtgttagacgacggctcaacgactgtggcggtgaagcggcttaaagacgcgaatccatgtccgaggaaagagtttgagcagtatatggagattattggtaggcttaaacaccaaaacgttgttaagctaagagcttattactatgctaaagaagagaagctcttggtttatgagtatcttcctaatggaagcttgcactctcttcttcatgggaatcgaggaccaggacggattccattggattggacgacgaggattagtctaatgttaggagcagcgagaggattagcgaagattcacgacgagtatagcatctcaaagataccacacggcaatatcaaatcctctaatgttctattggacagaaacggcgtcgcgctaatagctgatttcggtttatcacttttgctaaacccggttcacgctatcgctcggttaggaggataccgtgcgccggaacagtcggagatcaaacgtctctctcagaaagctgacgtgtacagttttggtgtgttgcttctcgaggttttaacaggaaaagcaccctcgatattcccgtctccgtctagacctagatcagcggcgtcggtggctgtggaggaagaggaagaagcggtggttgatttaccgaagtgggttagatcggtggtgaaggaggaatggacggcagaggtttttgatccggagcttttgaggtataagaacatagaggaggagatggtggcaatgcttcatatcggtttagcttgcgttgtgcctcagccggagaagaggccgacgatggcggaagttgttaagatggttgaggagattagagttgagcaatctccggtcggtgaggattttgatgagtcacgaaactcaatgtctccgtcgttggctaccaccgacggctaa

SEQ ID NO: 51 - DNA, 1128 bp, Arabidopsis thaliana
atgatggataacatcaactttgaattctcaaacgcttcacaaggaagccggctacagttgcagcaacaaccgccccagccgtttaatttacaagacttgaatatgattcaatacaatcaaccatcatctccttggactacggagaccttctctggtctaactccgtacgattgcacagccaatcaatcttttcccgtacaatgttcatcttcaaaaccctacccttcctcgtttcatccgtaccatcatcaatcttctgattctccatcattagaccaatctgtatcgatgattcctatgcagcctcttccggatcaatatatgaagccattatatcaaagatcttgctcgaacgattttgccgcaacaaatgcttcatcagcctcttactcgctttcttttgaagcaagtcatgatccacaagaactatgcagaaggacctatagtaattctaatgtaacacatcttaatttcacatcatcacaacatcaacctaaacagagtcatccaagattttcttctcctccttcattctcaatccatggagggtctatggctcctaactgtgtgaacaagacacggataagatggactcaagatcttcatgagaagtttgtggagtgcgttaatcgtcttggtggcgctgataaggcgacgcccaaggcgatattgaagcggatggattctgatggactcacaatatttcacgttaaaagccacttacagaagtatagaattgcgaaatacatgcctgagtctcaagaaggcaagtttgagaaaagagcttgtgcaaaagagctgtctcagcttgacacaagaactggagtgcaaattaaagaggcacttcagcttcaactagatgttcagaggcatcttcatgaacaactagagattcaacgaaacctacaactaagaatcgaagaacaagggaaacaactgaaaatgatgatggaacaacaacaaaaaaacaaagagagtcttctgaagaagctaccagacgctgaagcatcattgtctcttctcgatccccatattcactctcctccttcgcctttcttggtacacgacgctgaagccctgatgctaacaagttatgaagacactcaactccagtccaccaaaagttga

SEQ ID NO: 52 - DNA, 1452 bp, Arabidopsis thaliana
atgaattatccttacgaggacttcttggacctcttcttctctacccacactgacccgcttgccacggctgcaagcacctcttcgaatggttatagcttgaatgatcttgacattgattgggactgtgacttccgtgatgtcattgaatccattatgggtgatgaaggagccatgatggaaccggaatcggaagctgttccaatgcttcatgaccaggagggactttgtaactctgcgtcaacgggtttgtctgtggctgatggggttagttttggtgagcctaagactgatgaatcaaagggcttgaggttggttcacttacttgtggctgctgctgatgcgtcaactggtgcgaacaagtctagagagctaactcgggttatacttgcaaggcttaaagatttggtttctcctggtgaccgaactaacatggagaggttagctgctcacttcaccaacggactttcaaagttgctcgaacgagatagtgttctgtgtccccaacaacatcgtgatgatgtctatgatcaggcggatgtgatctcagcgttcgaactgctgcaaaacatgtctccatatgtcaactttggttacctcactgccacacaggctattcttgaagctgtgaagtatgaacgtcgaatccatatagtggattacgatatcaatgaaggcgttcagtgggcttcattgatgcaagccttggtgtctagaaatacaggcccgtcagcccaacatcttagaatcacggctttgtcacgagcaacaaacggtaaaaaatccgtggctgcagtccaagagactgggcggcgtctaactgcgtttgccgattctatcggccagccattttcatatcaacactgtaaacttgacaccaatgcattcagcacatcatctttgaaacttgtaagaggagaagcagtggtaatcaattgtatgttgcatcttcctcggtttagtcaccaaacacccagttcagtcatttcctttttgtcggaagctaaaactctaaacccgaaacttgttacgcttgttcacgaagaagttggtctgatgggaaaccaaggttttctatatcgttttatggacttgctacatcagttctcagccatattcgactctctagaggcaggcctttcaatcgctaacccggcccgtggctttgttgagcgtgtttttatcggtccttgggttgctaattggttgacgcgtatcaccgctaatgatgcagaagtcgagagctttgcttcgtggccacagtggttagagactaatgggttcaaacccttggaagtgagctttaccaaccgttgtcaagcaaaactccttttgagtttgtttaatgatggatttagagtggaagaattgggccaaaacgggctcgttttgggatggaaatctcggcgtcttgtgtcggcctccttttgggcctcgtgccagacgaatcagtaa

SEQ ID NO: 53 - DNA, 1317 bp, Arabidopsis thaliana
atgaagaagcgcttaaccacttccacttgttcttcttctccatcttcctctgtttcttcttctactactacttcctctcctattcagtcggaggctccaaggcctaaacgagccaaaagggctaagaaatcttctccttctggtgataaatctcataacccgacaagccctgcttctacccgacgcagctctatctacagaggagtcactagacatagatggactgggagattcgaggctcatctttgggacaaaagctcttggaattcgattcagaacaagaaaggcaaacaagtttatctgggagcatatgacagtgaagaagcagcagcacatacgtacgatctggctgctctcaagtactggggacccgacaccatcttgaattttccggcagagacgtacacaaaggaattggaagaaatgcagagagtgacaaaggaagaatatttggcttctctccgccgccagagcagtggtttctccagaggcgtctctaaatatcgcggcgtcgctaggcatcaccacaacggaagatgggaggctcggatcggaagagtgtttgggaacaagtacttgtacctcggcacctataatacgcaggaggaagctgctgcagcatatgacatggctgcgattgagtatcgaggcgcaaacgcggttactaatttcgacattagtaattacattgaccggttaaagaagaaaggtgttttcccgttccctgtgaaccaagctaaccatcaagagggtattcttgttgaagccaaacaagaagttgaaacgagagaagcgaaggaagagcctagagaagaagtgaaacaacagtacgtggaagaaccaccgcaagaagaagaagagaaggaagaagagaaagcagagcaacaagaagcagagattgtaggatattcagaagaagcagcagtggtcaattgctgcatagactcttcaaccataatggaaatggatcgttgtggggacaacaatgagctggcttggaacttctgtatgatggatacagggttttctccgtttttgactgatcagaatctcgcgaatgagaatcccatagagtatccggagctattcaatgagttagcatttgaggacaacatcgacttcatgttcgatgatgggaagcacgagtgcttgaacttggaaaatctggattgttgcgtggtgggaagagagagcccaccctcttcttcttcaccattgtcttgcttatctactgactctgcttcatcaacaacaacaacaacaacctcggtttcttgtaactatttgtttcagggcttgttcgttggttctgaataa

SEQ ID NO: 54 - DNA, 1167 bp, Arabidopsis thaliana
atgctttcttcaatcaaaccatcttcgtcttccttctccaccgctatctccggcagcgtaaggcggtcaattcctacaaagctcaagttttctcctttactcatcatcaaaaactgccataaccaaagctttaacgctaatgttgtctcccatcaaaagcctctacacatttcatctgcttcgaatttcaagcgtgaggtcaaagtcgaagcttacgaggccgatcgttcccgtccactggacatcaacatcgagcttcccgatgaacaatccgcgcagaaactgaaaatcggaatctacttcgcaacttggtgggcacttaacgttgtcttcaacatctacaacaagaaagtcctcaatgcttttccttacccgtggcttacttcgacgttgtctctcgcttgtggttctttgatgatgcttgtctcttgggctactagaatcgcagatgctcctaaaactgatctcgagttctggaaaactctgttcccggtcgctgtagcacacacgataggacacgttgcagcaacagtgagtatgtcaaaagtagcagtttccttcacacacatcattaaaagtggtgaaccagctttcagtgtcttagtctcaagattcttcatgggagagactttccctcttcctgtctatctctctctcttaccaatcatcggaggctgcgctctcgcggccatcaccgagcttaacttcaacatcactgggtttatgggggcaatgatatcgaatttggcatttgtgttccggaatatcttttcgaagaaagggatgaaagggaagtcagtgagcggaatgaactactacgcttgcttatcgatgatgtctcttgtgatcctcactccattttctattgccgtggaaggtcctcaaatgtgggctgctggttggcaaaatgcggtttctcaagtcggaccaaactttgtctggtgggtagtggcacaaagtgtgttttaccatttgtacaatcaggtctcatacatgtcattagaccagatttcgccgttaactttcagtatcggtaatacgatgaagcggatttccgttattgttgcatcgatcatcattttccataccccgattcaaccggttaatgccctcggtgctgccattgcgatttttggaactttcctctactcacaggcgaagcagtga

SEQ ID NO: 55 - DNA, 1083 bp, Arabidopsis thaliana
atgagaatcacacaaaacgtcaagctcttactcttcttcttcttcttcatctccttcctcttcatcgccgtatccgccggcgagtctaaatgcgagtgttcacacgaagacgacgaggcaaacaaagccggagcaaaaaaatacaagatcgccgcaattccttccgttctggccgccggagttatcggcgttatgtttccgttactaggcaagttcttcccgtcgcttaaaccggagacgactttcttcttcgtgacgaaagccttcgccgccggcgtaatcctcgcaacggggtttatgcatgtgttgcctgaaggttacgagaagctgacgtcaccgtgtctgaaaggagaagcctgggagtttccgttcacaggctttatcgcgatggtcgctgcgattttgactctttccgttgactcttttgccacgtcgtatttccataaagcgcattttaaaacgtctaagaggattggtgacggtgaggaacaagacgctggcggtggcggtggcggtggagacgagctcgggttgcacgtgcatgctcacggtcacacgcacgggattgttggcgtggaatctggtgaatcccaggttcagcttcaccggactcgagttgttgcacaggtgttggaagtgggaataatagtacattcagtggtaataggaatatcactgggagcatcacaaagtccagacactgccaaagctctctttgctgctttaatgtttcatcaatgcttcgagggtcttggtcttggtggttgcatcgcccagggaaatttcaattgtatgtcaattacaataatgtcgatctttttctctgtaacgacgccggtaggaatcgcggttggaatggcaatttcaagctcttatgatgattcgagtccaacggctctgatcgtacagggagtccttaacgctgcatctgcaggcatcctcatctatatgtctctagtggactttctcgcagcagattttatgcaccctaagatgcagtctaacactagacttcaaatcatggctcatatctctcttcttgttggagcaggggttatgtcacttttagctaaatgggcttaa

SEQ ID NO: 56 - DNA, 348 bp, Arabidopsis thaliana
atgaagtgttgtaagtttgttgcagtggctttgatgagtcttctgatctcacttgcttccgttgaggcggcaggtgagtgtggtcgcatgccaattaatcaagccgcggctagcctaagcccgtgtttgcctgctacaaagaacccgaggggtaaggttccaccggtttgctgtgccaaagttggtgctctcattagaaccaatcctcgttgtctttgtgctgtcatgctctctcctttagcaaagaaagccggaatcaatcctggaatcgcaatcggcgttcctaaacgctgtaacatccgaaaccgccctgctggcaagcgatgtggacgttacattgttccatga

SEQ ID NO: 57 - DNA, 4545 bp, Arabidopsis thaliana
atggactttctcggttccacgacgggtagcggtacgttagcaatgttgttctcgttttcggaatctattttgcctctggattctaggtctttccttctgaaacctcttttcctgagatggctttctggtttcttacactcggttttgttgctggtcctgtttttctcatgggttcgtaagaaaattaggggggatagtggtgttacggagagtttgaaagataggagggattttgggtttaagtcagctctgttttgtagtttagctctgtctctgcttaatctcgtgttgatgtcgttgagtggtttctattggtacgagagtggctggttagataatgaacagctagtttcctcccttgggtttcttttgggaatggtttcttggggggttttgtcgatttgtttgcatcgctgcagagattgtgagcataaaaaggctccctttttacttaggctatggttggttttctatctagtggtctcttgctactctcttgtggtagattttgtgatgtacgagagacgtgaaaccgtacctgttcaccttctagtgttcgatatagtcgcttttattgctgctgtgtttctcggttacgtggctgtcctcaagaaagatagaagcaacagcaatggagttttggaagagcctctgttgaacggtggtgattctcgtgttggtggtgatgacagcgttgagttaaataaaaccaatgggagtggtgaggctactccttactcgagagctggcattctcagtcttttgactttctcatggatgagtccattaatagacattggaaacaagaaaacccttgatctagaagatgttccgcagcttcatgatactgacagcgtagtcgggttagctcctaagtttcggagtatgcttgaatcaccagatgggggcgagagaagtggcgttaccacgttcaagcttataaaagccttgtattttacggctcagtgggagattctagtgacagccttctttgctttcatctacacggttgcatcatatgttgggccagcactcattgatactttcgtgcaataccttaatggacgtaggcagtataaccatgaaggatatgtgctagtcattactttctttgctgctaagattgtggagtgcctttcacagagacattggttctttaggctacagaaggttggtattaggatgagatcagccttggttgcgatgatatatgaaaagggtctgaccctttcatgtcagtcaaagcaaggacgcacaagtggggagattataaatttcatgactgtggatgcggagaggattggtaatttcagttggtacatgcatgacccctggatggtcttgttacaagtcggtctagctctgtggatcttgtatagaaatcttggactagcatcaatagcggctttagttgctaccattatagtaatgcttataaattttccattcgggagaatgcaagagaggtttcaggagaagttaatggaagctaaggatagccggatgaaatcaacatctgagatcttaagaaacatgaggattctcaagcttcagggatgggaaatgaagtttctctccaagatttttgatcttcggaaatctgaggaaggatggctgaaaaagtatgtgtataactcggctgttattagttttgttttctggggggctcctactctggtgtcagtctccacttttggtgcttgtatacttcttggaatcccccttgaatcaggaaagatactctctgcacttgcaaccttcaggattctacaagagccgatctacaatcttcccgacactatctccatgattgtgcagactaaagtctctcttgatagacttgcatcctacctttgcctggacaatttgcagcctgacattgtagagaggcttcctaagggaagttcagacgtggcagtagaagtgatcaacagcactttatcttgggatgtctcatcctctaacccgactctcaaagacataaatttcaaggtctttcctgggatgaaggttgcagtttgtggtaccgttggctctgggaaatcgagcttactttcatctttactaggagaagtacccaaggtatctggaagtcttaaggtttgtgggacaaaagcgtatgttgcgcaatctccttggattcagagtggtaaaattgaggataacatcttgtttggcaaacctatggaaagagaacgatatgataaggtgcttgaagcatgttcgttgagtaaggatctggagatactttcattcggtgatcagaccgttattggagaacgcggcattaatttgagtggtgggcaaaagcaaaggatacagattgcacgtgctctctaccaagatgctgatatctatctgttcgatgatccttttagcgctgtggatgcacacacagggtcacatctctttaaggaagttctactggggcttttgtgttccaaatcggttatatatgttactcatcaagttgagttcttacctgctgctgatcttatactggtcatgaaagatgggagaatcagccaagctggaaaatacaatgatatcctcaactctggaactgatttcatggagcttataggtgcgcatcaggaggctcttgcagtagttgattctgttgatgccaattctgtttctgagaaatcagctttaggccaagaaaatgtaattgtgaaagatgctatcgctgttgatgagaaactagaaagtcaggatctgaagaatgataaattagaatctgtggagccccaaagacaaattattcaagaggaagagagggagaaaggtagtgtcgctttggatgtgtactggaaatatatcacactggcatatggaggagctcttgtgcctttcatattgttggggcaagttctctttcagcttctacagattggaagcaactactggatggcttgggctactcctgtttctgaggatgtgcaagctcctgtgaaactttccacgttaatgattgtgtatgtggctttggcctttggaagttccctctgcattcttcttagagccacgcttcttgtcactgctggttacaagactgctactgaactgtttcataaaatgcatcactgcatattccgttctcctatgtctttctttgattccactccaagtggaagaatcatgagtagagcttctaccgaccaatccgcagtagatttggaactaccgtatcaatttggatcagttgctatcacagtgattcagcttattggaatcattggagtaatgtctcaagtttcttggctggtttttctcgtcttcatccctgtggttgctgcctccatatggtatcagcggtattacatagctgcagcacgagaactttcgcggttagttggagtatgcaaagctcctctaattcagcatttttctgaaacgatttcaggggcgacaaccattaggagtttcagccaagaatttagattccgttctgacaacatgaggctaagtgatggttactctaggcccaaattctatacagctggagcaatggaatggctttgctttcgccttgatatgttgtcatcacttacatttgtcttttcattggttttcttggtctccatacctactggagtgattgatccaagtctcgcgggattagccgtgacttatggactcagtttgaatactctgcaagcttggctgatttggactctctgtaatcttgagaacaaaatcatatcggtagagaggattcttcaatatgcaagtgttcccagtgaaccacctcttgtgatagaatcaaaccgacctgagcaatcatggccttcacgtggtgaagttgaaatccgtgatcttcaggtccgatatgctccacatatgcctcttgtgttgcgaggaataacatgcacattcaaaggaggtttaagaacaggaattgttggaaggacaggaagcgggaaatcgactttgatacaaactcttttccgcattgtagaaccttcagctggagaaatcaggattgatggagtgaatattttgaccattgggttgcatgacttgcgtttaagactaagcatcataccccaagatccaaccatgtttgaaggaacaatgagaagtaacttggaccctcttgaagagtacacagatgatcaaatctgggaggctcttgacaagtgccaactaggagacgaggtgaggaaaaaagagcaaaagctcgattccagtgtgagcgagaatggagacaattggagtatgggtcagagacaactagtgtgtctcgggagagttcttctcaagagaagcaaaatcttggtgcttgatgaagccactgcttctgttgacactgcaactgacaatctgattcagaaaacgctaagagaacacttctcagactgtacagtgataaccattgcacacaggatatcttcagttattgacagcgacatggttctgcttctaagcaatgggatcattgaggagtatgatacgccagtgagattactggaggataagtcttcctctttttctaagcttgtggctgagtacacctcaagatctagttccagtttcgattga

SEQ ID NO: 58 - DNA, 459 bp, Arabidopsis thaliana
atgggagctcttgattctctttccgagtatatctccgactacttccgcgtcaccagaaaaaggaggaagcggaaagtcatgcagacggtgaatataaaggtgaaaatggactgcgatggttgtgaacgcagagtcaagaacgcggtttcctccatgaaaggtgtgaaatcggtggaggtgaatagaaagatacataaagtgacggtgagtggatacgtggaaccaaagaaggtattaaagagaatcgaaaggacagggaaaaaagcggagatatggccgtacgttccttacaacatggtcgcatatccatacgcggtcggaacttacgacaaaaaagctccggccggttatgtcaggaaatctgagcagtcgcagttgcagctgttgccgggagctcccgagaaccactacatttctctttttagcgacgagaatcccaacgcttgcaccgttatgtaa

SEQ ID NO: 59 - DNA, 291 bp, Arabidopsis thaliana
atggtgatgatcaagaccacaatggtttccctttttgctctagcggcggttctcctaatgattctagccccggcggcagaagccgtgacgtgctcgccaatgcagctaagcccatgtgcaacggcgataacgtcgtcttctccaccatcggctttgtgctgtgcaaagctgaaggagcagaggccatgcttatgtggttacatgagaaaccctagcctccgtcgcttcgtcagcactcccaacgctcgtaaagtctctaaaagttgcaaactccccatcccaaggtgttaa

SEQ ID NO: 60 - DNA, 513 bp, Arabidopsis thaliana; identical to SEQ ID NO: 16

SEQ ID NO: 61 - DNA, 1905 bp, Arabidopsis thaliana
atggagaatactataacgagctctacctcctcaccgaagggccggggagtaaatttctcgaccccgagaggctttggttcaaaatttaagtcaaaatgtaaagaaaccttctttcccgatgatccattcaaaccgatatcgcaagagccaaaccgtttgctaaaaacaaagaagttattggagtattttgtgccaatctttgagtggctcccaaagtatgatatgcaaaaactaaagtatgatgtgctcgccggaatcaccatcaccagtcttgctgttcctcagggcatcagctatgctaagctcgccagtatccctcccatcataggcctatattcaagttttgtgccgccttttgtgtatgccgtgttcggaagttcgaacaatctggcagtgggaacagtcgcagcatgctctttgctgatcgctgagacattcggtgaggagatgataaaaaatgagcctgaactctaccttcatttgatcttcaccgccactctcatcaccggtctattccaatttgctatgggattcttgaggttggggatattggtggatttcttgtcacactcgaccataacgggcttcatgggcggtaccgcaatcatcattctcctacaacagcttaagggcatctttggactagtccattttacgcacaaaaccgatgtcgtatcagttctccactcaatcttagacaaccgggctgagtggaagtggcaaagtaccttggctggtgtctgctttcttgtatttctacaatccactcgatacataaagcaaagatacccaaagctattttgggtatcagcaatgggtccaatggtggtggtcgttgtgggttgcgttgttgcttatttggtgaaaggaacagcacacggcattgctactgttgggcctttaaagaaaggactaaatcctccttctattcaacttttgaactttgactccaagtatctagggatggtgtttaaggccggaatcgtcacaggactcatcgctttggccgaagggatagcaattggaagaagctttgctgtaatgaagaacgaacaaacggacgggaacaaagagatgatagcatttggtcttatgaacgtaattggctccttcacttcttgctatttgacaacggggccattttcaaagacagcagtgaactacaacgcggggacaaagacaccgatgtcgaatgtagtaatgggcgtttgcatgatgcttgtgcttctcttcctagcgcctctattcagctacacaccattagttggtctctcagccatcattatgtcagccatgttgggtctcatcaactacgaggagatgtaccatctcttcaaggttgacaagtttgatttcctcgtctgcatgtccgcctttttcggtgtttcattccttagcatggactacggtctcatcatctccgttggattttctatcgtaagagctttgttgtacgttgcaaggccctccacttgtaaattgggaaggataccaaactcggttatgtttagagacatagaacagtaccctgcctccgaggagatgcttggttatatcattcttcaattaggctctccagtcttttttgccaatagcacttacgtccgtgaacggatcttgaggtggattcgtgatgaacctgaagccatcgagtttcttctccttgatctctctggagtttcaaccattgacatgaccgggatggaaacactactcgaaattcagagaatccttggatcaaaaaacatcaagatggtgataataaatccaagatttgaagtcttggaaaagatgatgttgtcccatttcgtggagaagataggaaaagagtatatgttcttatcgattgacgatgcagttcaagcatgccgatttaatcttaccaccaccaagccggaagtgtga

SEQ ID NO: 62 - DNA, 1863 bp, Arabidopsis thaliana
atggttttggaggatagaaaggacggttcttctttgccgggacgatccggtagtttctctaaatcgtcaccgtcggagttggatgttgttgatccctacaagcggataagttcgccgggatctatattggatgctgagaaggtagagaaaaagcctggaggatggagagccgtctcgttcattttaggaaatgagacgctggagagactgggatcgataggattgttggcaaacttcatggtttatctaaccaaagtgtttcacttagaacaagtcgacgctgcaaatgtcatcaacatttggtcaggtttcaccaatctcactcctctcgtcggagcgtatatctcagacacttatgttggccgcttcaagaccatcgctttcgcctcattcgccactctcctcggactaataacaattacactcacagcatcgtttcctcaactccacccagcatcatgcaacagccaggacccactcagttgcggcggtccgaataagctccagatcggagttttgctattgggactctgtttcctctccgtagggagtggaggaatacgaccttgtagcatcccttttggggttgatcagtttgaccaacgaactgaggaaggggttaaaggagtggccagtttcttcaactggtattacatgactttcactgtggttctgatcattacacagaccgtagttgtgtatatccaggatcaagtcagttggattatcggttttagtatccctaccggactcatggctcttgcggttgttatgttttttgccggaatgaagcgttatgtctacgttaaaccagaaggaagtatattctctgggatcgctcaagttatcgtggcagctcgtaagaagcgaaagctgaaacttccggcggaagatgacggcactgtcacctattacgacccagccatcaagtctagcgtgttatccaagttacaccgcagtaaccaattcaggtgtcttgacaaagccgcggtggttatagaaggtgacctaacacccgagggacctcccgcagacaagtggcggttatgcagcgtccaagaagtggaagaagtgaagtgtttgatccgaattgttcctatctggtcggccggaataatctcactcgcggccatgacaacacaaggcactttcacggtctctcaagctttgaaaatggatcgaaacttaggtcctaaattcgagattccggctggttcactctccgtcatctctctcctcacaatcggcatctttcttcccttctacgaccgcgtttttgtaccattcatgcggcgaatcaccggccataaatccggaatcacactcctccaaaggataggaacagggatcgttttcgcgatcttttctatgatcgttgcgggcattgtggagcgtatgagacgcatacgctccatcaatgccggagatccaacgggaatgactccaatgtcggtgttttggctttcgccgcagctaattctcatgggactatgtgaagcattcaatatcatcggacaaattgagttcttcaacagtcagtttccagagcacatgagaagtatcgctaactctctcttctctttatcgttcgccggttcgagctaccttagtagtttccttgtgactgtcgttcataaattctccggtgggcatgatcgtccggattggctaaacaagaatctcaacgcgggaaaattggattacttctattatctgattgcggttttgggtgtggttaatctggtttacttttggtattgtgctcggggataccggtacaaggtcggtttaccgattgaagactttgaggaggacaagtcctccgatgatgttgagatgacttcgaagaaatcgatgaaatga

SEQ ID NO: 63 - DNA, 669 bp, Arabidopsis thaliana
atgaacattttcaagaagaagaccactcccaaagatgctcttcgtactagtaagagagaaatggctgttgctactcgaggtatcgaacgggagattacatctcttcaactagaggagaagagactagttgcagaaatcaagaaaacagctaagactggaaatgaggctgccacaaagattttagctcgtcaacttgttcgattgaggcaacagattaccaacttacaaggaagccgtgctcagattaggggtgtaacaactcatacacaggctctgtatgccagcacttcgatttcatctggtatgaaaggtgctaccaaagctatggttgcaatgaacaagcaaatggcaccaacgaaacaagccaaggtgattaaagatttccaaaagcagtcggcacagctagacatgacgatagagatgatgtcagaggcaattgatgaaacacttgacaaagatgaggctgaagaagaaacagaagatctcactaaccaggttcttgatgagattggtgttggtgttgcatctcagttatcttcagctccaaaaggtcggattgctacgaaaaccgcagctcctcccgcttccactgcagctactaacaagaactctgaatcaagtgaagtggatgagcttgagaagaggttggcttcgctacgacgaatctga

SEQ ID NO: 64 - DNA, 423 bp, Arabidopsis thaliana
atgggaaagctccagaagattgggagagtatgggattgtctttttcttccgacaaatcagtgttcatgtttttgtctaaacactctaggagatgaagaagaagagtttgagaaagagccattgatagattcttcaacagagaaatctgggaaagtcatgaggttaaaagatgttgtagctgctgatcatcgtcagactcttgcctttcatcttaagcctaagatagtggagctaaaggtgtcaatgcattgctacggatgtgcgaagaaagtcgagaagcatatttctaaattagacggagtgacatggtacaaagtggagctagagagcaagaaggtggtggtgaaagggaacatattgccggtagatgtgttagagagtatttgtaaagtcaagaatgctcagctttggtcttctccttga

SEQ ID NO: 65 - DNA, 1227 bp, Arabidopsis thaliana
atgatcttcgtcgatgttctttggaaattgtttcctctatactcgtttggatcaggaagagactctctctcagagtccattttgcagatcattcccgagacaatggcttcttctaccactaaaatcctctgtgatgctggcgaatcagacctctgtagagacgattctgctgcatttctccttaagtttgtagccattgcctccattctactagctggagctgctggtgtagccatacctctcattggcaggaaccgccggtttcttcaaaccgagggaaatctctttgtagctgctaaagcctttgcagctggtgtcatactcgccaccggctttgtccatatgcttgcaggtggcacagaagctctgagtaatccgtgtttaccggattttccgtggtctaagtttccctttcccgggttctttgcaatggttgctgctttagctactctgcttgttgatttcatggggacacagtactatgagaggaagcaagagaggaatcaggctgctactgaagccgctgctggtagtgaagagattgctgttgttcctgtggttggggaaagagtgaccgataataaagtgtttggtgaagaagacggtggcgggattcacattgtcggcattcgtgcacatgctgctcaccataggcatagtcactctaatagtcatggtacatgtgatggacatgctcatggacattcacacggacatatgcacgggaattcagatgttgaaaatggagctaggcatgttgttgtttctcagatattggagctcgggattgtgtcgcactcaatcatcatcggtttatccctgggggtatcacagtctccatgcacgatcaggcctcttattgcagctctgtcatttcaccagttctttgaaggatttgcgctcggaggctgcatctctcaggcacagttcaggaacaaatcagcgaccataatggcttgcttctttgcgctaaccacaccattagggatcgggattggaactgcagtggcctcatctttcaactcgcatagccctggagctttggtcactgaggggatactggactcgctgtcagctggaatactggtgtacatggctctggtggacctcatcgcagctgattttctgagtaagaggatgagttgtaatttgaggcttcaagttgtgtcttatgtaatgttgttccttggagctggacttatgtctgctctcgccatttgggcttag

SEQ ID NO: 66 - DNA, 1473 bp, Arabidopsis thaliana
atggctgaagaacctactactaccactctcgttacaccggaaaagctaccttctccgagcctcacgccttctgaagtatctgaatctactcaagatgccctaccgacagagacagaaactctggagaaagtgactgagactaatccaccggaaactgcagataccaccaccaagccagaagaagaaaccgcggcagagcatcatccaccgacagtgacggaaacagaaactgcatcgacggagaaacaagaggttaaagacgaagcatcgcagaaagaagtagctgaagagaaaaagagtatgattccacagaatcttggttcattcaaagaagaaagcagcaaactttctgatctatctaattccgagaagaaatcactcgatgaactaaaacatctagttcgagaagctctagacaatcaccaattcaccaacacaccagaagaagtcaagatttgggggattccattacttgaagacgatagaagcgacgtcgttttgttaaaattcctaagagctagggagttcaaggtgaaagattcgtttgctatgctcaagaacacaatcaagtggagaaaggagttcaagatcgatgaattggtcgaggaagatcttgtggatgatcttgacaaggttgtgtttatgcatggacatgaccgagaaggtcaccctgtttgttacaatgtctatggtgagtttcagaacaaggagctttataataagacgttttctgatgaggaaaagaggaaacatttcttgaggactaggattcagttcttggagaggagtataaggaagctagattttagctctggtggggtttctactatttttcaggttaatgatatgaagaattctccggggttagggaagaaagagcttagatcagctactaagcaagctgttgagttgcttcaggacaattaccctgagtttgtcttcaaacaggcttttatcaatgttccttggtggtaccttgtgttttatactgtgattggtccgttcatgacaccaagatcaaagagcaagcttgtgtttgctggtccttcgcgttcagctgaaaccctattcaaatacatatcacccgagcaagttccagtacaatatggtggattgagtgttgatccttgcgactgcaatccagacttttcgttggaagattcagcctctgagatcactgttaagcccggaacaaaacaaactgttgagatcataatctatgagaaatgtgaacttgtgtgggagataagggtaactggatgggaagtgagctacaaggctgaatttgtgccggaagagaaagatgcttacacggtggttatacaaaaaccgaggaagatgagaccatccgatgaaccggtgttaacccatagcttcaaagtgaatgagcttggcaaggttttactcacagtagacaacccaacctctaagaagaagaagctcgtttacaggttcaatgtcaaacctctctaa

SEQ ID NO: 67 - DNA, 3054 bp, Arabidopsis thaliana
atgcggagaaacgtatctgatcatgcagagaagaaggacaaggtgggcgttgaggttcttctggaacttcccaaaaccctaagcaaatcaaacaaaaaatggcaattagcattgatcaagctctactgttcaagaactctcctcaattgcgccaaacacgctatccgaaaacccggtttgttccctcgttctctttcatacaccgccattgatcttgatcaccatcatggagatgatcacttcaagattgatactgaaaccttaaacgatctcgtcaagaacaagaaccaagagaaacttgagtctcttggtggtcctaatggcttagtctcagctctcaagagtaacacacgtctcgggatcaacgaagaaggtgatgagattcaacgtagacgttcaacgttcgggtccaacacttacacaagacaaccatcgaagggtcttttccattttgtggtggaagctttcaaggacttaacgattcttatccttctcggttgcgcaacgctctctctcgggtttggtatcaaagagcatggattaaaagaaggatggtacgatggaggaagtatattcgtagcggttttcttggtggtagctgtctctgcggtcagcaacttcagacagaacagacagtttgataaactctctaaagtaagtagtaacattaagatcgatgttgttagaaacggacgtcgtcaagagatttcgatctttgatattgtcgttggagatatcgtttgtttgaacatcggagatcaagttccagctgatggagtgttcgttgaaggacatttgttacacgttgatgaatcaagcatgactggagaaagcgatcatgtcgaggttagcctaaccggaaacacatttttgttctccgggactaaaatagctgatgggttcggtaaaatggcggttacttccgttgggatgaacacagcttggggacaaatgatgagtcatatctcgcgtgacactaacgagcaaactccgttgcagtctcgtctcgataagcttacttcttccataggtaaagttggtttacttgtagctttcttggttcttttggttctgttaattcgttacttcacgggaaccacgaaagacgagagcggaaaccgtgagtataacggaaagactacgaagagcgatgagatagtgaacgctgtggttaagatggttgcagctgcggttacaatcatcgtagttgcgatacctgaaggattgccattagctgtgacattgacattggcgtattcaatgaagagaatgatgaaagataatgctatggtgagaaagctctctgcttgtgagacaatgggctctgcaacggttatttgtaccgataaaaccggtactttgacgcttaaccagatgaaggtaaccgatttctggttcggtctcgaatcaggaaaagcttcttctgtgtctcagagagttgttgaattgtttcatcaaggagttgcaatgaacactacagggagtgtgtttaaggctaaagcaggaacagagtatgagttctctggttctccaacggagaaagcgattcttagctgggcggttgaggaactggagatgggtatggagaaagtgattgaagaacatgatgttgttcatgtggaaggtttcaattcagagaagaagagaagtggtgtgttgatgaagaagaaaggcgtaaacacagagaacaatgttgttcattggaaaggagctgctgagaagattctagctatgtgttcaacgttctgtgatggttctggagttgtgagagagatgaaagaagatgataagattcagtttgagaagattattcaatctatggcagctaaatctctccgttgcatcgcctttgcgtattcagaagacaatgaggacaacaagaagttgaaagaagagaagttgagcttacttgggatcattggaatcaaagatccgtgtagaccaggagtgaagaaagctgttgaggattgtcaattcgccggtgtaaacatcaaaatgatcaccggggataacattttcacggcgagagcaatagctgttgagtgtggaatcttgacacctgaagatgagatgaatagtgaagctgtgttagaaggagaaaagtttcgaaactacactcaagaagaaagattagagaaagtcgaaagaatcaaagtgatggcgagatcttcaccctttgataagcttcttatggtgaaatgtctcaaggagttaggtcatgtggtggcggttactggagatggtactaacgatgcaccagcgttgaaagaagctgatattggactttctatggggattcaaggtacggaagtagcgaaagagagctcagatatcgtgattcttgacgataactttgcttctgttgcaacggttttgaaatggggaagatgcgtgtacaacaatattcagaagtttattcagtttcagctcactgtcaatgtagctgctctagtgatcaacttcgtggctgcagtttcagctggagacgttcctttgacagcggttcagttactgtgggttaatctgatcatggacacactcggtgcattggctttagctacagagaagccaacaaacgatcttatgaagaagaaaccgatagggagagtggcgccattgatcacaaacatcatgtggaggaatctactagctcaagcgttttaccaaatctctgtgctcttggtgcttcagtttagaggaagatcgattttcaacgtgactgagaaagtgaagaacactttgatcttcaatacatttgtgctttgtcaggtgttcaacgagtttaacgctaggagtttggagaagaagaatgtgtttaaagggttacacaagaacagactcttcattggaattatagttgtgactgtggttttgcaagttgtgatggttgagtttctcaagagatttgctgatacagagaggctaaacttgggtcaatggggagtttgcattgccatcgcagctgcatcgtggccgattggatggttagtgaagtctgttccggttccagagagacacttctttagctacctgaaatggaagaagagatcatga

SEQ ID NO: 68 - DNA, 1623 bp, Arabidopsis thaliana
atgactgctgaagttaaggttgaggagaaacaggtggagtcagaggttgttattgctcctgctgttgttcctgaggagactactgttaaggctgttgtggaagagactaaggttgaagaagatgagagcaagcctgagggtgtggagaagagtgcttccttcaaagaagagagtgatttctttgctgatttgaaagaatctgagaaaaaggcactgagtgatctcaagtctaagcttgaggaagctattgttgacaacactctcttaaagacgaagaagaaggagagctctcctatgaaggagaagaaggaagaggttgtgaaacctgaagctgaggttgagaagaagaaggaagaagcagcagaggagaaggttgaagaagagaagaaatctgaggctgttgttaccgaagaagcaccgaaagctgagactgttgaggctgttgttacagaggagataatccccaaggaagaagtgactactgttgttgagaaggtagaagaagaaaccaaggaagaagagaagaaaaccgaggatgttgttactgaagaagtgaaagctgagactattgaggtggaggatgaagatgagtcggtggataaggatatcgagctttggggagtgccattgcttccaagcaaaggagctgaaagcacggatgttatcctcttgaagttcttgagagcaagagactttaaagtcaacgaagcctttgagatgctgaagaaaaccctcaaatggagaaagcaaaacaagattgattcgatccttggagaggagtttggggaggatcttgccactgcagcttacatgaacggtgtggaccgcgagtcccacccagtttgttacaatgtccacagcgaggagctttaccagacgattgggtcggagaagaacagagagaagttcttgagatggaggtttcagctgatggagaagggaatccagaagcttaatcttaaaccaggaggtgttacttctcttctccagatccacgatctcaaaaacgctcctggagtgtcaagaacagagatttgggtcggaatcaagaaagtaatcgagactttgcaggacaactatccggaattcgtgtccagaaacatattcatcaacgttccattctggttctacgccatgagagctgtcctctcgccattcttaactcaacgaaccaagagcaagtttgttgtggctcgtcccgctaaggtcagagagactcttctcaagtacattccagctgatgagctcccagttcagtacggtgggttcaaaacagtagacgataccgaattctccaacgaaactgtctctgaagttgttgttaagcctggatcatctgaaaccatcgaaatcccagctcctgagactgaaggtacattggtatgggacatagcggttttgggatgggaagtgaattacaaggaagagtttgtgccaacagaagaaggagcttacacggtaatagtccaaaaggtgaagaagatgggagcaaatgaaggaccaatcaggaacagtttcaagaacagtcaggctggtaagattgttcttaccgttgacaatgtctctggcaagaagaagaaagttctgtacaggtacagaaccaagactgaatcctcttcctga

SEQ ID NO: 69 - DNA, 1188 bp, Arabidopsis thaliana
atgggtttcttagagttgttggaggtggcttcaatgccaatcgttcaagttcttcttatcagcgtccttggcgctttcttggcaaccgattactgctctcttctctctgctgacacccgaagatccgtgaacaagctcgtcttcgtggtattcaccccctgcatcatgtttgccaaccttgccgagactgtcacattgcaggacattatttcatggtggtttatgcccataaatgttggaatcacctttctagtaggaggcattcttggatggttggtggtcaagctactgaaccccaaacctcaacttcatggcctcataattgctacttgtgcctcaggcaatatggggaaccttatgcttatactggtccctgccatctgtgacgaggaaggcagtccttttgggaatcgtagtgtctgcagatccattgggctctcctacgcatctttctctatggccctcgggggtttctacatatggacgtacagttaccaactggtaagaagctctgctacacagtttagagctcttgaagccgccgggttggtcaagtctcccaacaaggacatcgactctgatccccacgctcttctcctcaagccgcaccaaaaccaagaccttgaaatccaaggcaaacaaaaagtgtctaccaggacatacatcaaggacttgctccatcagattcttgaggaactcttcgcaccacccaccattggtgccattcttggcttcgtcttcggagcaaccaattggctaaggaatcttataattggggagaatgccccgttgcgagtgatccaagactcagtaaagctacttggggagggcacaattccttgcatcacactcatactggggggaaacctgattcagggtctgcgttcatcagctgtgaagaaatcagtgattgtgggagtgataattgtgcgctatatcctccttcccgtggtgggagtcggggtggtccaattagcaggaaatctaggctatcttcctccagaccctctctttcgatacgttctcatgcttcagttcgcactaccgcctgccatgaatattagcacaatggcacaactgttcgacgtggctcaagatgagtgctcggtcatcttcttgtggacctacctggttgcatctttagccctcaccgtctggtcaaccatcttcctctccatcctctcctga

SEQ ID NO: 70 - DNA, 1230 bp, Arabidopsis thaliana
atggatgcttcattgtctccattcgatcaccaaaaaactcaaaacacagagccaaagaaaagcttcattacctcactaatcactctccgttcaaacaacatcaaagaagacacatacttcgtctcagaactcaaacccacggagcaaaaatcacttcaagaactcaaagaaaagctctcagcttcatcctccaaagcttcttcaatgtggggagtctcactcctcggtggagacgacaaagctgacgtaatcctcctcaagttcctcagagcaagagatttcaaagtagcagactctttgagaatgcttgagaagtgtttggagtggagagaagagttcaaagcagagaaattgacagaagaagatctgggttttaaagatttggaaggtaaagttgcttacatgagaggctacgacaaagaaggacacccagtttgttacaatgcttatggtgtgtttaaagagaaagagatgtatgagagagtgtttggtgatgaagagaagcttaacaagtttctgagatggagagttcaggttttggagagaggtgttaaaatgcttcattttaaacctggtggtgttaattccattattcaagttacagatcttaaagatatgcctaagagagagcttagagttgcttctaatcagatcctctctctttttcaagataattaccctgaattggttgctactaagatattcataaacgtgccttggtacttcagtgtgatctactcaatgttcagcccattcctgactcagagaacaaagagcaagtttgtgatgtccaaagaaggcaatgcagcagaaacactctacaagttcattaggccagaagatattccggtgcaatacggtggtcttagccgtcctactgattcgcaaaacggaccgccaaaaccggcgtctgaattctccatcaagggtggtgagaaagttaacattcagattgaaggcattgagggtggagcaaccataacatgggatatagtagttggaggatgggatttagagtacagtgcagagtttgttccaaacgctgaagagagttacgcgatcgttgtcgagaaaccgaagaagatgaaagctacagatgaagctgtttgcaactctttcactacagtagaagctgggaagctcattctctctgttgacaatactctctctcgcaagaagaaagttgctgcttaccgttacactgtccggaaatctactacaaccgtctaa

SEQ ID NO: 71 - DNA, 486 bp, Arabidopsis thaliana
atgaaagtcacaagctactctcgaattctaataatcttggcagcacttgtgggtgctcttgttgttcccttgaaggctcaagacagccagcaagactatgtaaatgctcacaaccaggcacgatcgcagataggcgtaggccccatgcagtgggacgaaggacttgcagcctacgctcggaactacgcaaaccaactaaaaggagactgcagactcgtacattcccgtgggccttacggggagaacttggcaaagagtggcggtgacttgtctggtgttgctgccgtgaacttgtgggttaacgagaaggctaactacaactacgatacaaacacgtgcaacggagtttgcggtcactacactcaggtcgtttggagaaattctgtgagactcggatgtgctaaagtgagatgtaacaatggtggaaccatcatcagttgcaattatgatcctccggggaactatgcgaaccagaagccttactga

SEQ ID NO: 72 - DNA, 1713 bp, Arabidopsis thaliana
atgcaccaaccctttcccggagattcttcaccaccaaactgccttcacggctgcttctcatcgtcaccatttcacggtaccaccagctccgaacacccaccacattcaacccccaccgtcacttccgctactctccgccgtaatttcgcccaaaccaccgtctccaccatcttcccggacaccgaattcaccgacccaaattctcttccttctcatcaagaatctttctccgatttcatccaagcttaccccaactactccgacacttacaagatcgaccgtcttagatccgaccactactttcacttgggtttatcacattacacatgtcttgattacataggaattggtttgtactcttactctcagttgctcaactacgacccttccacttaccagatctcttcttccttgtctgaaagtcccttcttcagtgtttctcccaagattggtaaccttaaggaaaagcttctcaacgatggaggtcaagaaacagagtttgagtactcaatgaaaagaagaataatggggtttctcaaaatctccgaggaagactactcaatggtcttcaccgctaatagaacttctgctttcaggctcgtcgccgagtcttacccgtttaactcaaaacggaagctcttgacggtttacgactacgagagtgaggcggtgagtgaaataaacagagtctctgagaaacgtggagccaaagtagctgcagctgaattctcatggccaagactcaaactctgttcgtccaagctgagaaaactggttactgctgggaaaaacggaagcaagacgaagaagaaaggtatttacgtctttccgcttcattctagggttacaggatctaggtatccgtatctatggatgagtgtggcacaagaaaatgggtggcatgtaatgatcgatgcatgcggtttgggacctaaggatatggatagtttcgggctttctatatataaccccgatttcatggtgtgttcgttctacaaggtgtttggagaaaacccttccggatttggttgcttgtttgtcaagaaatccaccatatcgattcttgaatcttccactggtccaggtatgattaacctcgtacctaccgacaatccgatttcattacacgcgttggaaatcaaccgaacacaaacagattcggaagaaacatatagctttagctctagtgtcgaatacaaaggcctagatcatgtagattcactagggttggtagcaacagggaacagatcaagatgcttgataaattggttggtaagtgctctctacaaactcaaacattcaacaactagtcgtctagttaaaatctacggtccgaaagttaatttcaatcgaggaccagcggttgcgttcaatctattcaaccataaaggcgaaaaaatcgaaccttttatcgtgcagaagttagccgaatgcagcaacatctcactcggtaaaagtttcttgaagaacatcttgttccaagaagactacgaaggcgtgaaagatagagtttttgagaagaaaagaaacagagacgtcgacgaaccaaggatctctgttctcactgctgcgttagggtttcttgctaatttcgaagatgtttataaactttggatattcgttgctcggtttttggattcagagtttgttgataaagagagtgtgagatgtggagttcatgtttttgaacataagaaccgtgaagtagtctag

SEQ ID NO: 73 - DNA, 1029 bp, Arabidopsis thaliana
atgccatggtctgcacactttctgagcgttttcaagtatctcaaccacgccaagacggtggaggatggacgccgcggcgtttctgaaccggaaaacatgagccgtctccgagcattttctgcgccggatttagtcccttcagattctggatctattacatcatcaccaacaagaaccatagagcaccaatctcatgaagattctggtttggaaggaatcactacgaacgtgaagctactgctgaaactcgttcaagatcacaacgaagcaacatcgaggcaccacgatgattggaaagttcagagagtcaacactatgatgacgattctcgatgatctaaagacacgaatccagaaagctcaacaacaatcatcatctgggaaaaaagagcttagacgatgctacaccgatctgaaacggagtcctgatctaaccaagagtccaacaaagccaccacagaacgatcctgaagatattcagaaactgagaaaagagttaagcgcgagtatggctgcaagaaagagtcttcaaatgatgtgttcaagtttagggaaggagaaagagataatggctttggagctttcgaggaaagctcacgaattaaacgaaatggaggagcttgtaagtgattttagggctcaaaatgagaaattacttaagaaagtgcagaattgcgcggtagagcataataaggagaagaaagaagatattgatggtccaggtccaggagacaacaatgtgcctctacagggaagaaacaaagagttgtctgaacagctactcaaatctattgacggataccgatctctgaaaaggaaatacaaagatgttcaagacgaaaatggatcaatgagacgagcgcttagagattatgcagaaggagtgaatgttgggactcagagactaaccaagttgcatgaaaagatcacaagagaagatgaagtgaatattgagaatgagatttcaaatttagagaagttgtttcaagggcttggtttaaagattttgaatcattcccagaacaagtaa

SEQ ID NO: 74 - DNA, 1272 bp, Arabidopsis thaliana
atgacatctctccatacgttactcttctcttctcttcttttcttcatcgtctttccaaccttcacgttttcctccaccttattgtttcagagtttcaattgggagtcatggaagaaagaaggaggattctacaattctctccacaactccattgacgacatagccaacgctggaatcactcatctttggcttcctcctccttctcaatccgttgctcctgaaggttacttaccgggaaagctatacgatctaaacagctccaaatacggttcagaggcggaactgaaatcgttaatcaaagcgttgaatcaaaaaggaataaaagctttggctgatatagtgattaaccacagaacagctgagaggaaagacgataaatgtggatactgttatttcgaaggtgggacttccgatgatcgtcttgattgggatccttcctttgtctgccgcaatgaccctaaatttcccggtaccggaaacctcgacaccggaggagattttgatggagcgcccgacatcgaccaccttaaccctagagttcagaaagagttgtccgaatggatgaattggcttaaaactgaaatcggattccatggttggagatttgattatgttcgaggttatgcatcttccatcaccaaattatacgttcagaatacatcaccggattttgcggtgggtgagaaatgggacgatatgaagtacggaggagacgggaaactagactatgatcagaacgagcatcggtcgggtctcaaacagtggatcgaggaagcgggtggtggtgtgttgacagcttttgatttcaccaccaaagggatcttacagtctgctgtcaaaggtgagctttggagactaaaggactcgcagggaaaaccgcctggtatgataggaatcatgcccggaaacgctgtcacattcatagataaccatgatacattcagaacgtgggttttcccttctgataaagtcttgcttggatacgtttatatacttactcatccaggaactccttgcattttttataatcattacatagaatggggactaaaagagagcatctcaaagctggtggctatcaggaacaaaaatgggattggtagcacaagctctgtaacgataaaagcggcagaggcggatctctacttggctatgattgatgataaagttatcatgaagattggaccaaagcaagatgtgggaacacttgttccttctaattttgctttagcttattcaggccttgactttgctgtctgggagaagaagtaa

SEQ ID NO: 75 - DNA, 294 bp, Arabidopsis thaliana
atggcgaattgtatcagaagaaatgctcttttcttcttgactcttctctttttattgtcagtctccaacctcgttcaggctgctcgtggtggtggcaaactcaaaccccaacagtgcaactcaaagtgtagcttccgttgttcagcaacatcacacaagaagccatgcatgttcttttgcctcaagtgttgcaaaaaatgtctttgtgttcctcctggcactttcggcaacaaacaaacttgtccatgttacaacaactggaagactaaagaaggccgtccaaaatgtccttaa

SEQ ID NO: 76 - DNA, 927 bp, Arabidopsis thaliana
atgacgagtaaaagcaaaatcctgttcatcggaggaacgggttatatcgggaaatatatagtggaagcgagcgcaagatctggccacccaaccttagttctcgttcgaaattcgacgctcacaagcccttcacgatcctccaccatcgagaatttcaagaacctcggcgttcagtttctcctcggagaccttgacgaccatacgagtctcgtgaattcgataaagcaagcggatgtggtcatctctactgttgggcactccctcttgggacatcaatacaagatcatctccgccattaaagaagccggtaatgttaagagattctttccctccgagtttggaaatgacgtagaccgtgttttcactgtcgaaccggccaagtcagcctatgctacaaaggccaaaatccggcgaacaattgaggccgaaggaatcccatacacttatgtctcatgcaacttcttcgctggctacttcctcccaactctagctcagcctggtgctacttctgctccacgggataaggtcattgttttaggtgatgggaaccccaaagctgtgttcaacaaggaagaagacatcggaacttacacaatcaatgccgtagatgatccaagaactttgaacaagatcttatatattaggccaccaatgaacacttactcattcaatgatcttgtctcgctttgggagaacaagattggcaaaacacttgaaagaatctacgttccagaagaacaactcctcaaacagatcatagaatcatcacccccactcaacgtgatgctatccctttgtcactgcgttttcgtgaaaggaggacacacaagctttgaaatcgaaccttctttcggggtagaagcttctgagctttaccctgatgtcaaatacactactgttgatgaaatcctcaaccaatatgtctaa

SEQ ID NO: 77 - DNA, 285 bp, Arabidopsis thaliana
atggctgtattcagagtcttgcttgcttctcttctcatatctcttcttgtcctcgacttcgtccatgccgatatggtgacgtcgaatgacgcccctaaaatcgattgcaacagcaggtgccaagagcggtgcagtctttcgagtaggccaaatctttgtcacagagcgtgcgggacttgctgcgctaggtgcaactgcgtggcaccgggcacatccggaaactacgacaaatgtccgtgctatggtagcctaaccacccacggaggacgcagaaagtgtccttaa

SEQ ID NO: 78 - DNA, 936 bp, Arabidopsis thaliana
atgactattctcatagatcgccactctgatcagaacgatgcaggagatgagattgtagagaagaatcaggggaatggtaaagaggaagaaacagagttggtgttagatgcaggtttcgaggctcctcacaccaactcttttggtcgcaccttcagggattatgatgctgagagtgaaaggagaagaggtgttgaggaattttacagagtcaatcacattggccaaaccgttgatttcgtgaggaagatgagagaagaatacgagaagctaaatcgtacggagatgagcatttgggaatgttgcgagcttctgaatgagtttatcgacgagagtgatcctgatttggacgaacctcagatcgagcatctgcttcagacagctgaagccatcagaaaagattaccctgatgaagactggctccatctgaccggtcttatccacgatcttggaaaagttcttcttcactcttcatttggtgagctccctcagtgggctgtcgtcggtgatacatttccagtgggatgtgcttttgatgaatctattgttcaccacaagtacttcaaggagaatccagactatgataacccgagttacaactctaagtatgggatatacactgaaggctgtgggctcgacaatgtgttaatgtcttggggacatgatgattacatgtaccttgttgcgaaggagaatcaaactactttaccatcagccggtcttttcatcatcagataccattcgttctacgctcttcacaaatcagaagcatacaagcatttgatgaacaatgaagacagagagaacatgaagtggcttaaagtgttcaacaagtatgatctctacagcaaaagcaaagtccgcgtaaacgttgaggaagtgaaaccatattatctctcccttaccaacaagtattttccgtccaagctaaaatggtga

SEQ ID NO: 79 - DNA, 351 bp, Arabidopsis thaliana
atgagaggactctccacaaaacccgttgcgataatcatcgcaattctcaccgtccacttcttattcgccgccgtaacctcccaatcctccggcgatttcgtaccgatcgagtcgaaatgcaacggtaccatcgccgagtgctccttatccacggcggaggaagagttcgagatggactctgagatcaacaggcgtattttagcaacaacgaagtatataagctacggtgcgctgaggagaaacacagttccttgctcacgacgcggcgcatcttactacaattgccgacgtggagctcaggctaatccttactctcgtggctgtagcgctattactcgttgcaggcgataa

SEQ ID NO: 80 - DNA, 1446 bp, Arabidopsis thaliana
atgcggaagttaacggcggttaattcactactgaaacggaacaattatcttcttccgcgccatggctcctcacaaacagcagctcagagaacatcctccgtccgcgagaccgagaccgaaacaaaacttccgaaaatgcccccgttcaattattctccgccgccttacgacggtccatctacggcagagatcatcgcaaagcggcgagagttcctcagccccgctctttttcacttctacaacacacccttaaacattgtggaggcaaagatgcagtatgtgttcgacgagaatggacgtcgatatttagatgcctttggaggaatagcgacggtttcgtgcggccattgccacccggaagtagttaactccgtcgtcaaacagttgaaacttattaaccactccaccatcctttaccttaaccacaccatctccgatttcgctgaagcccttgtctccactcttccgggagatctcaaggtggtgtttttcacgaattcgggtacggaggcgaatgaacttgcgatgatgatggctagactgtatacaggatgtaacgacatcgtttcgcttaggaactcttatcatggaaacgcagctgctactatgggtgccactgctcagtccaactggaaattcaacgtcgttcagagtggagttcatcacgccataaatccagatccttacagaggaatatttggatccgacggtgaaaagtacgcgagtgatgtacacgatcttatccaattcggaacgtccggtcaagtcgccggtttcattggcgaatcaatccagggtgttggaggaatcgtagagcttgctcccggatacttaccggcggcttacgacatcgtgaggaaagccggaggagtttgcatcgccgatgaagtccaatccggttttgctcgtaccggaacccatttctgggggtttcaatcccatggtgttatccctgacatcgtcaccatggccaaggggatcggtaacggtataccacttggagcggttgtgacgacaccggagattgccggcgttttaagccgtcggagttactttaatactttcggcggaaatccaatgtgcacggccgcaggacacgcagtacttagagtccttcacgaagagaagctccaagagaatgctaacctcgttggctcacatcttaaacgtagacttacgctactcaaaaacaaatacgaactcattggagacgtgagagggagaggattgatgctaggagttgagtttgtcaaagaccgcgacttaaaaactcctgcaaaagcagagacccttcatttaatggatcaaatgaaagaaatgggagtgttggtggggaaaggtggattctatgggaatgtcttcagaatcactcctcctctctgcttcaccctctccgacgctgatttcctcgtggatgtgatggatcacgccatgtccaagatgtga

SEQ ID NO: 81 - DNA, 609 bp, Arabidopsis thaliana
atggcggaacttgagaatccaagtgtaatgtcgaagctgatagcattcttatcttcattgctagagcgagttgctgagtcaaacgatctgacccgacgagtcgcgactcagtcacagagagtttcggtgtttcatggactgagtcgaccaacgataacgattcagagctatctagagaggatcttcaaatacgcaaattgtagtccttcttgcttcgtcgttgcttacgtttatctcgatcgtttcactcacagacaaccttcacttcccatcaattcctttaacgtccatcgtcttctcatcactagtgtcatggtcgctgctaaattcctcgatgatctgtactacaacaatgcgtattacgcgaaagtgggaggaataagcacgaaggagatgaattttctagagctggatttcttattcgggttaggatttgaattaaacgtgacgccaaacacattcaacgcctacttctcttatcttcaaaaggaaatgactcttcttcaacctctctctctcgttgttgtcccatcatcaagatctctcattaccttcaacgacgatgaagcttctcatcagaaacaacaacaacaacaactcgctgtttga

SEQ ID NO: 82 - DNA, 1245 bp, Arabidopsis thaliana
atggcgacaggaccagttgttcatcctcaaccagttagaggtgatcccatcgacctcaaaaacgcagcagcaaagaatcgtcgtgctcttggcgacattggaaacgtcgattctcttattggagtcgaaggaggaaagcttaaccgccccattactcgtaactttcgtgctcagttgctagaaaacgcacaagttgcagccgccgctaacaaaaaggctccgattcttgatggagttactaagaaacaagaagttgtaagagcggttcaaaagaaagcaagaggtgataagcgtgagccgtcaaaaccaatcgaagtgattgtgataagtcctgatacaaacgaggttgctaaagctaaagagaacaagaagaaagtgacatactcttcggttcttgatgctcgaagcaaggctgcttctaagactttggatattgattatgtcgacaaagaaaatgatcttgctgctgtggaatacgttgaggatatgtacattttctacaaagaagttgtgaatgagagcaaacctcagatgtatatgcatacacaacctgagattgatgagaagatgagatcaatccttattgattggcttgtagaagttcatgtcaagtttgatctctcccctgagactctttacctcactgtcaacataattgatcgttttctttctctgaagactgtgcctagaagagaactacagcttgtaggtgttagtgctttgcttatagcttcgaagtacgaagaaatctggcctcctcaggtcaatgatttggtatatgtgactgataactcctacaacagcagacagattctagtgatggagaaaaccattttggggaatcttgaatggtacttgacagttccaacacagtatgtgttccttgtgaggtttattaaagcctcgggttctgaccagaaactggagaacttggttcactttctagctgagttgggtttgatgcatcacgacagtttaatgttctgtccttccatgcttgctgcatcagcggtctacacagcaaggtgttgcttgaacaagactcctacttggactgatacactgaaattccacacaggctactccgaatctcagctcatggattgctcaaagcttttagctttcattcactcgaaagcgggggagagcaagctacgtggtgtgttgaagaagtattcgaaacttggaagaggtgctgttgctctgatttcaccagccaagtctcttatgtcatctgctccatga

SEQ ID NO: 83 - DNA, 390 bp, Arabidopsis thaliana
atggcagcttcgtctctcaatctcctcctcattctctctcttctcactttcatttctctccagagatctgaatctctttccgataatccatctctcactcttctacccgacggattcgactggccgatctctcactccgatgaattcgatatcatcgacggtgaagaaagcttcgaagttacggaggaagacgacggcgtaacagatcgacggtcattgtactggcggaggacgaagtattacatatcgtacggtgcattgtcggcgaatagagtgccatgtcctcccagatctggaagatcgtactacactcataactgcttcagagctagaggtcccgttcatccgtatagccgaggctgctcgtcgatcactcgatgccggagatag

SEQ ID NO: 84 - DNA, 1077 bp, Arabidopsis thaliana
atggtgaagaagcaatcgccattacacgttgtcggtgtgtctgttttgatggtgttgttatgcagtgttaattacagtctctgtgaaaagatcaaaacgtataagctcacaagaggaagcttaagtgttactttcactaactatggtgctgtcatgacctctcttctcctccctgacagacatggaaaacaagacgatgttgttcttggatttgatactgttgatggttacaagaatgatacaacatattttggagcaattgtgggaagagtggctaatagaataggaggtgctaaattcaagttaaatggtcatctctacaaaaccgatcccaacgaaggccgtaacactctccatggtggttcaaagggatttagtgatgtgatttggtcagtccaaaagtatgttcccactagtcacattactttcacatacgatagcttcgacggtgaagaaggttttccgggcaatgtgacggtgaaagtgacgtacatgttgatcggagaaaacaaactcggtgtaaaaatggaagcaaagccactcaacaaacctacaccaatcaacttagctctccacacttactggaacctccacagccacaactccgggaacatcctctcccacaaaattcaactcctcgccggaaaaatcactcccgtcgacgacaaactcattcccaccggagaaatcacctccattaccggaactccttacgatttcctcgagccacgtgagatcggtagccggatccacgaattacccggcggttacgacatcaattacgtgatcgacggaccgatcgggaaacatctgaggaaaactgcggttgtgacggagcaagtcaccgggaggaagatggagctgtggacgaatcagcctggtgttcagttttacacgagtaatatgatgaaacgtgtcgtcggtaaaggtaaagccgtttatgagaaatacggtggcttgtgtttggagactcaaggcttcccagattccgtcaatcacaagaactttccgtcgcagattgttaatcccggcgagagttatttgcatgttatgctcttcagattcactgctcactaa

SEQ ID NO: 85 - DNA, 1059 bp, Arabidopsis thaliana
atgggagaactcgacgaagcttttatccaagctccagaacacagacccaacactcacctcacaaactccggtgatttcattttctccgacgagatcccgaccatcgacctctcttctctcgaagatactcatcatgacaagactgcgatcgccaaggagattgcagaggcatgcaagagatggggattttttcaagtgatcaaccatggcttgccttcagctttaaggcatcgtgtagagaagacagctgctgagtttttcaatctaacgacggaggagaagaggaaagtgaaaagagacgaagtgaatcctatgggttatcacgacgaagaacacactaagaacgttagagattggaaggaaattttcgatttcttcttacaagattccacgatcgttccggcgtcaccggagccggaagatactgagctccgaaagctcacgaaccagtggcctcaaaacccttctcatttcagagaggtatgccaagaatatgcaagagaagttgagaagttagcttttaggctattggaacttgtctccattagtttgggtctacctggtgatcggctaaccggtttcttcaatgagcaaactagttttttgcggtttaaccattaccctccttgcccgaaccccgagctagcattaggtgttggacgtcacaaagatggaggagctttaaccgtcctggcccaagatagtgtaggtggattacaagtgagtcgtagatcggatggacaatggatccccgtgaaaccgatctcggatgctttgatcattaacatgggcaattgtattcaggtgtggacaaatgatgagtattggagtgctgaacatagagtggtcgtgaatacaagcaaagagagattctcaataccattcttcttcttcccatcacatgaagccaatattgagccattggaggagcttataagtgaggaaaacccgccttgttataaaaagtacaattggggaaagttctttgtttcaagaaacagaagtgatttcaagaaactcgaggttgagaatatccagattgatcacttcaaggcttag

SEQ ID NO: 86 - DNA, 1998 bp, Arabidopsis thaliana
atgtctccacttctccggtttagaaaactatcgtccttctctgaagataccattaaccctaaacccaaacaatcggcaaccgtcgagaaaccaaaacggcgccgttccgggagatgtagctgcgttgactcatgttgctggttgattggttatctctgtacggcgtggtggcttctcctctttctttaccactctgttccggtcccggcgatgcttcaagctccggagtctccgggaactcggttgagtcgagacggtgtcaaggcgtttcatccggtgattcttgttccggggattgtaaccggcgggctcgagctttgggaaggtcggccttgcgctgaaggactctttcgtaaacgtctttggggtgctagcttctccgagattcttagaaggccattgtgctggttggagcacttatctctagacagtgagaccggtctcgatccatcgggaatccgtgtccgagcagtcccaggactagtggctgcagactatttcgcaccatgctactttgcttgggcagttctcatagagaatttggcaaaaattggatatgaaggcaagaaccttcacatggcctcttatgattggagactctctttccataacaccgaggtacgtgaccaatcgttaagtagactgaagagcaaaatcgagctaatgtatgccaccaatgggtttaagaaagttgtggtggttccgcattcaatgggggctatctatttccttcacttccttaaatgggtagaaacacctcttcctgatggaggcggtgggggtggtccaggttggtgtgccaaacacatcaaatccgtcgtcaacattggacccgcctttttaggtgttcctaaagccgtcagtaatttactttctgctgaaggcaaagacatcgcttacgccagatctttggctccaggtctcttggactcggaacttctcaagctgcaaacactcgaacaccttatgcggatgtcacatagctgggattcaatagtatctttattaccaaagggcggtgaggcaatttggggcgatctagactcgcacgctgaagaaggactcaattgtatttactccaagagaaaatcatcgcagctatcgctaagtaatctccataaacaaaactacagccttaaaccggtgtcacgggtgaaagaacccgcaaagtacggaagaatcgtatctttcgggaaacgagcatcagaactgccttcctcacaactctctacgctaaacgtcaaggaactgtcaagagtagatggcaattcaaatgacagtacatcatgtggagagttttggtcagagtacaatgaaatgagccgagaaagcatagtaaaagtagcagaaaacacagcttatacagccaccactgttcttgatcttcttcgatttatagcccctaagatgatgagacgagccgaagctcatttctctcacggcattgctgatgatcttgatgaccctaagtatggacattataagtactggtctaatccactcgagaccaaattaccggaggcaccagagatggaaatgtactgtctttacggagtagggattccgaccgagagatcttacatatacaagctcgcaacctcttccggtaaatgcaagagcagcattcccttccggatagatggatctctggatggagatgacgtttgtcttaagggaggaacacggtttgcggacggagacgagagtgtaccggtgataagtgcggggtttatgtgcgcaaagggatggagaggaaaaacacggtttaacccgtcagggatggatacattcttgcgggaatacaaacataagccgccgggaagtctactagaaagtcgaggaacggaaagcggagctcatgtagacataatgggtaatgttggactcattgaagatgttttgaggatagctgccggagcttcaggccaggagattggtggcgatagaatttactcggatgtgatgaggatgtcggagagaattagcatcaagttgtga

SEQ ID NO: 87 - DNA, 1644 bp, Arabidopsis thaliana
atggggagtgaagtcaaccgtccactagctgattttccagcaaatatctgggaagatccattaacttctttctcaaagtctgacctcggaactgagacgttcaaagagaagcatagtacgctaaaggaggcggtgaaggaagcttttatgtcttccaaagcgaatccgatagagaacatcaaattcatcgatgctctatgtcgccttggtgtctcctatcactttgagaaagatatcgtagaacaattggataagtcatttgattgtcttgattttcctcagatggtaagacaagagggatgcgatttgtacacggttggaataattttccaagttttcaggcaattcggctttaaactttctgccgatgtgtttgagaagttcaaggacgaaaatgggaagttcaaaggacacttggtgacagatgcatacgggatgttaagtttgtacgaagctgcacaatggggcactcacggagaagacattattgacgaagctctcgctttctcacgttctcatttagaagaaatttcgtctcggtctagccctcatctcgcaattcgcatcaagaatgctctaaaacatccataccataaaggcatctctaggatagaaacaagacaatatatctcatactacgaggaggaagagtcgtgcgacccaacattacttgagttcgcaaagatagattttaatttgctgcaaatattacaccgcgaagagcttgcttgcgtcacaaggtggcaccatgaaatggagtttaaatctaaagtaacatacacaaggcataggataacagaggcatacttgtggtcacttggaacatatttcgagcctcaatattctcaagcacgagttataaccactatggcactaatcttattcacagcgcttgatgatatgtatgatgcatatggcacaatggaggaacttgagcttttcactgatgcaatggatgagtggcttcccgttgttcctgatgagataccgatacccgatagcatgaagttcatttacaatgtgacggtagaattctatgataaactcgacgaggaacttgagaaagaaggaaggtcagggtgcggtttccatcttaagaaatcattgcaaaaaacagcaaatggatatatgcaagaagcaaaatggttgaaaaaggattacattgctacatttgatgagtataaagagaatgcaatcttgtcttcaggttattatgccttgatagcgatgacattcgtgagaatgacagatgtcgcaaaacttgatgcttttgaatggttaagctcacatcctaaaattagggtagcttctgagataataagtcgattcacagatgacatttcaagctacgaatttgaacacaaacgggagcatgtagcgactggcattgattgttatatgcagcaatttggtgtttccaaggaaagagctgtggaagtgatgggaaacattgtttcagatgcatggaaggacttgaaccaagagctaatgaggcctcacgtgtttcctttccctcttttgatgcgagttcttaacctttcgcgagtcatcgatgtattctataggtaccaagatgcttacaccaaccccaagctcttgaaggagcacattgtttctttgctcattgaaactatacccatttga

SEQ ID NO: 88 - DNA, 1566 bp, Arabidopsis thaliana
atggattcttgttgcaactttagcttggggacaaaaactgtcttggccaaagacagtttcaagaatgtagagaacaaatttttgggtgagaagatcaaaggaagcgtcttgaagcctttttcttcagatttgagttccaagaagttcagaaatcgaaaattgaggcccggtgttgcttacgctattgctacctcaaagaatgctaaagaggctttgaaaaatcaaccttccatgtttgagagaagaagagcagatcctaaaaatgtggctgcaatcattctaggaggaggcgatggagctaaactctttcctcttaccaagcgagcagcaacacctgctgttcctgtgggtggatgctataggatgatcgatatcccgatgagtaattgcattaacagttgcataaacaagattttcgtgctgactcagtttaactcggcttccctcaatcgccatttggctcgtacttattttgggaatggcataaactttggagatggttttgttgaggttctggctgctacacaaactcctggtgaagccgggaaaaagtggtttcaaggcacagctgatgctgtgagaaaatttctgtgggtgtttgaggatgctaagaacaggaacattgagaatataatcatcttgtctggagatcacctatatagaatgaactatatggactttgttcagcaccatgtcgatagtaaagccgatattactctttcgtgcgcgccggttgatgagagccgtgcgtcggagtatggactggtcaatattgatcgaagcgggcgtgtagtccatttctctgagaaaccaactggcatcgatctgaaatcaatgcaaaccgatactactatgcatggactgtctcatcaagaagcagcaaaatctccatacattgcgtcaatgggagtttattgtttcaaaaccgaagctttactgaagcttctgacatggcggtatccgagttccaatgactttgggtctgaaattattcctgcagctataaaagatcacaatgttcaaggatacatctacagagactattgggaagacatcggaactattaagagtttctatgaagctaatattgctcttgtcgaggagcatcccaagtttgagttttacgatcagaatacacctttctacacttctcctcggtttctaccacccaccaaaaccgagaagtgccggattgtaaattcggtaatctcacacggatgtttcttgggagaatgcagcatccaacgttccattattggtgaaagatcacgtcttgactatggtgttgagcttcaggatactcttatgttaggagcggatagttaccaaaccgaatctgagatcgcgtctctgcttgcggaaggaaatgttccaattggcattggccgagatacaaagatcaggaaatgcatcattgacaagaatgcaaagatcgggaaaaacgtggtgatcatgaacaaagatgatgttaaggaggctgataggccagaggaaggattctacattcgatctggaatcactgtggttgtcgaaaaggccaccattaaagacggtactgtgatatga

SEQ ID NO: 89 - DNA, 1086 bp, Arabidopsis thaliana
atggctccaacactcttgacaacccaattctcaaatccagctgaagtaaccgactttgtagtctacaaaggaaatggtgttaagggtttatcagaaacaggaatcaaagctcttccagaacaatacattcagccacttgaagaacgactcatcaacaaattcgtcaacgaaacagatgaagccattccagttatcgatatgtcgaaccctgatgaggacagagtcgctgaagctgtttgtgatgctgctgagaaatgggggttctttcaagtgatcaatcatggagttcctttggaagttcttgatgacgtcaaggctgcgactcacaagttcttcaatctccctgttgaagagaagcgcaagttcactaaagagaattcgctgtcgacgactgttaggtttgggacgagttttagtcctcttgcagagcaagcgcttgagtggaaagattatctcagcctcttctttgtctctgaagctgaagctgaacagttctggcctgatatctgcaggaatgaaacgttagagtacattaacaagtcaaagaagatggtgaggaggcttctagagtatttgggaaagaatctcaatgttaaagagcttgacgagacgaaagaatcactctttatgggctcgattcgagtcaaccttaactactaccccatctgccctaatccggacctaacagttggtgttggtcgccactcagacgtctcttctctcaccattctcttacaagaccagatcggtggtctacacgtgcgttctctggcttcagggaactgggttcacgtgcctccggttgctggatcttttgtgatcaacatcggagatgcgatgcagatcatgagcaatggtctgtacaagagcgtggagcatcgtgtcttagccaatggttacaataatagaatctctgttcctatctttgtgaacccaaaaccagagtcagttattggtcctctacctgaggtgattgcaaacggagaggaaccgatttacagagacgtcctgtactctgattacgtcaagtatttcttcaggaaggcacacgatggaaagaaaaccgtcgattacgccaagatctga

SEQ ID NO: 90 - DNA, 3144 bp, Arabidopsis thaliana
atggagaaaccgggtatgtctttattgaaaggatcactttgtgttattgtttttcttcttctgttgtcgttggttgagagcgtcaaaggcgggggatacgtgaagtatggaaccgaagctaaagtggttccggggaaactaaatgttcatcttgttccgcattcgcatgacgatgtcggctggttgaaaactgttgatcagtactacgtaggatctaacaacagaatccagaacgcttgcgtgaggaacgtcctagactcggtggtggattctctacttcgtgatcccaatagaaagtttgtgtttgcggaaatggccttctttacgcgttggtgggaagaacaaagccccgagagacaagagcaagtgaggagactagtgaaatccgggcaactagagtttgtaaatggaggatgggctatgaatgatgaagcaacgtgccattacatagatatgatagaccaaaccacaaaggggcatcggtttataaagcaacagttcaacacaactccacgtgctgcttggcaaatcgatccctttggtcattcctctgttcaagcttacctccttggagcagagttagggttggattctgtgcatttcgcgagaatcgattaccaagacagagaaaagcgaaaggccgagaaatcacttgaagtcatctggagaggatcaaaaacactggattcttcttctcagatattcaccaatatcttctttgttcattacggccctcccactggctttcactatgaagtcaccgacgattacgtacccctccaggacaaccctcgtttcgatggctataacattaaggaggcggttaatgatttcgtcaatgcttctcttgtttatgctaatgtgagtcgagggaaccatgtgatgtggacaatgggcgatgattttcagtaccagttcgccgagtcttggttcagacagatggacagacttatccattatgttaacaaggatggccgtgtgaacgccttgtactccacaccatctctctatgttgatgccaagaatgttgccaatgttacttggcctctcaagactcatgactttttcccatatgcggatcgggcatacgcttactggactggctacttcaccagccgtcctgctcttaaacgatatgttcgggctcttagcggatactacatggctgcaaggcaacttgaatttctggtgggcaagaactctggaggtccaaacacttacagtcttggggatgctttagggatagcgcagcaccatgatgctgtcactggaactgccaagcagcatgtaacaaatgattacatgaaacgccttgctcttggtgcttctgaggcagaagctgtggtgaattctgcgctggcatgcctaatgaacaaagcaccaaaaggtggctgcacaaagcctgcaatagcattcagccagcagtgctcgttgatgaatatcagctattgcccatcgacagaagaaacccttccaggccagaagagcttgattctggtggcgtataactcccttggatggaaccgtacagaaatcatcaggattccggtcaatgatgcaggtctaagtgtggaagattcatctggaaacacccttgatgctcaatacatccccatggataatgtcacgagcaacctcagaagtttctacacaaaagcttatttaggaatatcttccctgcagcgtccaaagtattggctcgtgtttaaagcaaaggtgccaccacttggttggaacacattcttcatatctaaagcatccgcacaaggaagcaacaatcacaaacactcttcagtgatgcttagtccgatgaacaatacgactgaaattggtccaggaaatctaaagatggtgttttcttcagactctggtcgtctcgaacggatgtacaactccagaacaggagctgacataaaggtggatcagaactatttctggtatgcttcaaatgttggggacgcaaaagatccccaggtttctggtgcatatatatttcgacctaatggttccttggcgtatcctgtttcgtcgtccaaaatatgtaccgtgactagtgctttcattggcaatggaaacgtgcagtcaaagttgcagattgtgcgagggcctttaatagatgaggtgcaccagcagtttagtccttgggtggcacaggtggtaagactatacaaagaaaaagagcacgccgaatttgagttcactattggtccaatttctgttggtaagggacatctaacaggaaaagagattatcacgcgaatggtaacagatatgactacagctaaggagttctatactgactctaatggaagagactttctgaaacgggtccgggacaaccgaacagactggcatctcgaagtgaatgagccaatagcaggaaactactatccgcttaatcttggaatgtacataaaagacgagaaagcagagttgtcggtgttggttgatcgggctactgggggtgcaagtattaaggacggtgaaatagagttgatgcttcacaggagaacgtccatggatgactcgagaggagtggaggagagccttgtagaaactgtgtgtgtgaatgacacctgcgcaggattgacgattcgtgggaattactatgtaagcataaataaggtaggagaaggagggcggtggagacgagagactggacaggaaatatactcacctcttctaatggcattcgcacacgagaacaaggagaaatggaaagcctcaaatactgtgaaaggttatgccatggatcatctctacaccttgcctcaaaacattgctctcatcactcttgaggagttggatctcgggaacgtccttcttcgcctggctcatctctacgaggcgggagaagacagtgattactctaaaatcgctaaagttgagttgaagaagttgttttccggcaaaatgatcaaagaagtgacggaaatgagtttgtcagcaaatcaagagaaagtaaagatgaaggagaagatgaagtggaaagtggagggtgaagcggaacaaccttcttccccgctaagaggcggacccgttgacaagtcgactttagtagtagagcttggtcccatggagattcgtacatttgtggttcagttttatcagaaacaacgaagaagaaagttgtttgtgggatga

SEQ ID NO: 91 - DNA, 1005 bp, Arabidopsis thaliana
atggcccctgagatttccgtaaacccgatgtatttatccgaaaaggcgcatcaagcacctccaaggagagcttatgtgacgtttttggcaggaaatggagactacgtgaagggagtggtgggactagcaaagggtttgcgtaaggtcaaaagtgcgtatcctcttgttgttgctatgttacctgatgtgcctgaggaacatagagagatcttgaggtctcaaggctgtgtcgtgcgtgagatcgaacctgtttatcctccagacaaccaagttgagtttgccatggcttattacgttctcaactactcaaaacttcgtatttggaactttgaagagtacagcaagatgatataccttgacgcagatattcaagtctttgacaatatcgatcacctctttgatttgtctgatgcatatttctatgccgtgatggactgtttctgtgagaaaacatggagccactcgctgcagtattcaattgggtattgtcaacagtgcccggagaaggtcacgtggccagaagatatggaatctccacctcctcctctgtatttcaacgccggtatgtttgtgtttgagcctagtcctttgacttatgagagtctccttcagaccctggagatcacaccaccttcaccgtttgcagaacaagattttctcaatatgttctttgagaaagtgtacaaaccgatccctttggtatacaatctggttttggctatgctttggcgtcacccggagaacgtggagctggagaaagtcaaagttgttcactactgtgcagctggatccaagccatggagatacacaggagaagaagctaacatggacagagaagacatcaagatgttagttgataaatggtgggatgtctataatgatgaatctctcgatttcaaatcgaaaatccctgcagatgcggaagaaaccgttacaaaatcaagcatcctagcttccgttcttgaaccagaaatgacctactttcctgctccttctgctgcttga

SEQ ID NO: 92 - DNA, 975 bp, Arabidopsis thaliana
atgaaaaacttcaatcttactcacagaatcgttatggcgccaatggcgagaatgagatcatacggtaacattccacaacctcacgtcgccttgtattattgtcaaagaacaactccgggaggtcttctcatcagtgaagccaccggagtttctgaaaccgccatggcgtatcaaaacatgccagggatatggaggaaagaacaaatcgaagcatggaagcccatcgttgacgctgttcactctcacggcggcatcttcttctgccagctctggcacgctggtcgcgtttctcatcaagattgtcagccaaatggagaatctccggtctcttcaacagataagccattcgccgatgatccatcgaatgagtttacacctccgagaaggttaagaactgacgaaatcccgacaattatcaatgattttcgtctcgctgcaagaaacgcaaccgaagctggttttgatggagtagagatccatggagctcacgggtacttgattgaccagtttatgaaagactctgttaacgatcgaaccgatagttacggcggatctctagagaatcgatgtagattcgctttacaagtaatcgaagcggtttcgaaagagatcggacctgatcgtgtcggaatcagactctcaccgttcgctgattacatggaatccggagatacagatccaaaaagattagggctttacatggccaagtctctcaacagattcgagatactctactgccacatgattgagcctaggatgaaaaccgtcagtgagattttcgagtgcagggaatcacttacgccgatgagaaatgcgtttaatggaacgttcattgtcgccggaggttatacaagagaagacggaaacaaggcggtggcagagggaagaacagatcttgtagcgtacggaagattgttcttagctaatcctgatttgcctaaaaggtttgagctcaatgctccgctgaataagtaa

SEQ ID NO: 93 - DNA, 1473 bp, Arabidopsis thaliana
atggcgagaagttctgttttgctatgtttaattctattggttacgttaggagttgtgataagtgtcacatttgccgacaacgttgaattgaaatcaaaagatctagagagcagtaagaaagataagaaggttgatcatgatagtacacacaaagagaagggaggtgaaaaggtagatggtgccggttctgatgatgaagacaacgataaaaaagaaaaaaagaaagagcatgatgtgcaaaaaaaggataaacaacatgaaaacaaagacaaggatgacgagaagaagcatgttgataagaagaagagcggtggtcatgataaagatgatgatgatgaaaagaagcacaaggataaaaagaaggatggacacaatgatgatgatgatagtgatgatgatacggatgatgacgatgacgatgatgatgatgatgatgatgatgatgaagttgatggagatgataatgagaaggagaaaattgggttatacgagctcaagaagggaaatctaactgtcaaattcacaaattggggtgcttcaatcatatctctccatttcccagacaaaaatggtaaaatggacgatattgttcttggctatgatagcgtcaaaacctacaagaccgacaaggtttatttcggagcaaccgttggccgagtagcaaatagaataggaaagggcaaattcaagttgaatggtaaagagtacaagacaagtgtcaacgatggaaaaaacacactccatggtggcaagaaagggtttggggatgttgtgtgggcagttgcaaaacaccagtacgatggcaagaaaccacacattgtcttcactcacacaagtcctgacggcgatcaagggtttccgggagaactcagtgtcacggtgacatataaacttgtcaaagacaatgaattgagtgtggtgatggaggcaaagcctaaggataaagcaactccggtgaacttagctcatcatagttattggaatcttggtggtcataattccggagatattttgtctgaagaaattcaaatcctcggctcgggttatacccccgtcgacggtgagctcattcccaccgggaaaatcaatccggtgaaaggaacagcatacgattttctccaactccgtcctattaaagataatatgaaggatcttaaaacaggatatgatataaattattgcttagatggtaaggcaaaaaagatgagaaaaatagttgaactcgtagataagaaatcagggaggaaaatggagttatccggaaaccaagcgggtttgcaattctataccggagggatgttaaaggatgtcaaagggaagaatggggcagtttaccaagctttcgggggattatgtttagaaacacaaagttatccagacgcattgaaccatcccaaatttccttcacagattgtcgagccagggaaaaaatacaaacacactatgctcttcaagttttctattgtttcatag

SEQ ID NO: 94 - DNA, 888 bp, Arabidopsis thaliana
atggcttacaatagcaatagcaataacaacaacaacaacattgtcgttgttttcgacttcgacaagaccatcatcgacgttgatagcgataattgggtaatcgatgaacttggcttcactgatttgttcaatcaacttctccccaccatgccttggaacacactcatggaccgtatgatgaaggagcttcatgatcaaggcaaaaccattgaggagatcaaacaagtcttgagaacaatcccaattcatccacgtgtcgtccctgccatcaaatctgcacatgatttagggtgtgagcttaggatagtgagcgatgcaaacatgtttttcatcgagaccatcgttgaacatctcggaattagcgaactcttctctgagatcaactcgaacccaggatatgtcgatgaacgtggcacattgaaaatctctccctaccacgacttcactaaatcccctcatagctgctcttgtggcacttgccctcctaacatgtgcaagggtttgatcattgagaggattcaacaatctttagctaaagaagggaagaagaaaatgatctatctaggagatggagctggcgattactgtccaagtttgaaactaaacactgaagattacgtgatgccacgtaagaatttccctgtatgggatctaattagtcaaaatccaatgctgattaaagcagcgattagagaatggaccgatggccaaagcatggagatgatattgataggaacgatcgaggagattagattggaggaagagaaggagaagatgttgactagtgcggagaataattgcaagatgcagaccatctctatcgggattaataatgttcatcatgaaccaatattgcctcgtgctcttcgtgtgtctcagtctagttag

SEQ ID NO: 95 - DNA, 1263 bp, Arabidopsis thaliana
atgggagaaaacggagccaagcgatggaacttcggagctaacgaggtcgtcgaacgatctaactcacttaccattcgtgattaccttaacaccttaatcaattgtctcgacggtggtgatgtaagacccgtcatcccactaggtcacggcgatccttctccgttcccgagctttcgtaccgatcaagccgctgttgaagccatctgtgatgctgtccgttcgaccaagtttaacaactactcttcttcttccggtgttcctgtcgctaggaaggctgttgcagagtacctctctagtgatctctcttaccagatatcaccaaatgatgttcatatcacagctggttgtgtgcaagccattgagattttgatatccgctctcgcaattcctggagctaacattctgctacctaggcctacttacccgatgtacgattcccgagcggctttttgccaactcgaggttcgttatttcgacctcctaccggaaaatggttgggatgttgatctagatggagttgaagctcttgcggatgacaaaaccgttgctatacttgttatcaacccttgcaatccatgtgggaatgttttctctcgccaacatcttcaaaagattgcagagacggcttgcaagcttggtatacttgtgatcgcagacgaagtctatgaccattttgcctttggggataaaccatttgtgtccatggcagagtttgcagagctagtgcctgttattgtcttaggtgctatatctaaaagatggtttgttcctggatggagacttggttggatggtgactcttgaccctcatggcatcatgaaagattctgggtttgttcagactcttatcaatgttgtcaacatgtcgacggatcctgcaacgtttattcagggagcaatgcctgatatcattgggaatacaaaggaagagttcttctcatcaaaacttgaaatggtgaaaaaatgtgcagagatttgttatgaggagcttatgaagattccttgcatcacttgcccctgcaaacccgagggctcaatgttcacgatggtgaagttaaacttttcactactcgaagatatcagtgatgatttggacttctgctccaagctggctaaagaggaatctatgatcatcctaccaggtcaagctgttgggcttaagaactggctacgtatcacctttgcagttgagcttgagcttctcatagaagggttttccaggctaaagaactttactgagagacactccaagaatcagccatga

SEQ ID NO: 96 - DNA, 840 bp, Arabidopsis thaliana
atggctaagaataacaacatcgtgatcgtcttcgattttgacaagacaatcatcgatgtagacagcgataattgggtcgtggatgaacttggtttcactgatttgttcaaccagcttctcccaacaatgccttggaactctctcatgaatcggatgatgaaggagcttcatgatcatggtaaaaccattgaagaaatcaaacaagtccttaggagaatcccaattcatccacgtgtcatcccagccatcaaatctgctcatgctttagggtgcgagctgagaatagtgagcgacgcaaacacgttgttcatcgaaacaatcattgaacatctcgggattggtgagtttttctccgagattaacacaaatccaggacttgtagatgaacaaggaagattaatagtctctccttaccatgacttcaccaaatcttctcatggttgctctcgttgccctcctaacatgtgcaagggtttaataatcgataggattcaagcttctctaacgaaagaagggaagacgagcaagatgatctatcttggagatggtgctggtgattactgtcccagtcttggactcaaagctgaagattacatgatgccaaggaagaatttcccggtttgggatttgattagtcaaaatcccatgttggttaaggctaccgttagagattggaccgatggagaagatatggagaggatactaatggaaataatcaacgaaattatgtcatcagaggaaggagaggagaatgacaagatgttgagctctgaaaactgcaagatatctgttgggattgttcatgaacctattcaagttcctttaaatttggtcaagtga

SEQ ID NO: 97 - DNA, 978 bp, Arabidopsis thaliana
atgatgatgagtcgtcgctatggagccaagctaatggaaactgctgtgactcacagccatcttttgaatcctagggttcctctcgtgacggaaaatattagggttccggcgatgggagtcgtgagagttttcagcaagatgacatttgagaagaagaaaactacggaggagaaaggatctagcggtggcaaggctgatcaaggtaacaaaggggagcaattaatcgttagctactggggagtgaagccgatgaagatcaccaaagaagatggaactgaatggaaatggagttgctttaggccatgggagacatataaatcagatctgactatagatttgaagaagcatcatgttccatcgactttaccggacaaactagcttattggaccgtgaaatctcttcgatggcctaccgatcttttcttccagaggcggtacggatgcagagcaatgatgctagaaacggttgcagcggttccaggaatggttggagggatgttagtacactgcaaatcgcttcgacggtttgaacaaagcggtggttggatcaaagccctacttgaagaagcagagaacgagagaatgcatttaatgacattcatggaagtcgcgaaacctaattggtacgaacgagctcttgtgattgccgttcaaggcattttcttcaatgcttatttccttggatacctaatttctcccaaatttgctcatcgtatggttggataccttgaggaagaagcaatccactcttacactgagtttcttaaagaactcgataatggtaacatcgaaaatgtgcctgcaccggctattgccattgattactggagacttgaagctgatgcgacgcttcgtgatgtcgtcatggtggtccgtgctgatgaagcgcatcaccgtgatgttaaccactatgcatccgatattcattaccaaggtcgtgagctaaaagaagctccagctcccattggatatcattga

SEQ ID NO: 98 - DNA, 1533 bp, Arabidopsis thaliana
atgttgtggatcaaaaacctagcaagaatctcgcagaccacttcttcgtctgtcggaaacgtgttcagaaaccccgaatcctacactctctcgtcccgtttctgcaccgctctgcaaaagcaacaagtaaccgacacggttcaagcaaaggaggatgtagttaatgcgttggagccacaacgttacgacggtttggctccgacgaaagagggagagaagccgagagttttggttctcgggtcgggttgggcgggttgtcgggtattaaaagggatcgatactagtatttacgacgtcgtttgtgtctctcctaggaaccacatggtcttcactcctctcttggcttctacttgcgttggtacgcttgagtttaggtctgttgctgaaccaatctctcgtatccaaccggcgatttcacgagaacccggttcttattacttccttgctaattgctccaaacttgatgctgataatcatgaggtgcattgtgagactgtaactgaggggtctagcacattgaagccatggaagttcaagatagcttatgacaaactggtactagcttgtggtgcagaagcatccacatttggaattaatggcgtcttagaaaacgccattttcctccgtgaggttcaccacgctcaggagatccgtaggaagcttcttcttaacctcatgctctctgaagttccaggcataggtgaagatgagaagaagaggctgttgcattgcgttgtggttggaggtgggccaactggtgttgagtttagtggtgaattgagtgatttcatcatgaaagatgttcgtcagagatattctcatgtgaaagacgacattcgtgttactctgattgaggcaagggatatactttcttcttttgacgatcggctaaggcactatgcaatcaagcagttaaacaagtctggagtgaagcttgtgcgtgggattgtgaaagaagtgaagcctcagaagctaatccttgatgatggcactgaagttccttacggtcccttagtctggtcaactggtgttggtccatcttcatttgtgaggtctcttgattttcctaaagatccaggtggaaggattggtattgatgagtggatgcgtgtaccttctgtacaagacgtgtttgcaattggtgactgtagcggttatctcgagagcacagggaaatcaacacttcctgcacttgcacaggtggctgagagagaaggcaaatacttggcgaatctgtttaacgtgatgggaaaagctggaggaggacgggccaatagcgcaaaggaaatggagcttggggaaccatttgtgtataaacatctcggaagtatggctactattgggagatacaaagctctcgttgatctccgtgagagcaaggaagggaaaggaatatcaatggcaggttttctgagctggttcatatggaggtctgcttatctgactcgagtcgtcagctggagaaaccgtttctacgttgctatcaattggctcactacctttgtctttggtcgggacattagccgaatctga

SEQ ID NO: 99 - DNA, 1101 bp, Arabidopsis thaliana
atgacgaactcggtggctaagttggcactactagggttttgcattctgcaagtgacgagcttacttgttccgcaagcaaatgctagggctttccttgtgtttggagattctctcgttgacaatggtaacaatgactttcttgctaccactgctcgtgccgataattacccttatggtatcgatttcccaactcatcgtcctacgggccgtttctccaatggtctaaacattccagatctcatcagtgaacatttgggtcaagagtctccaatgccgtaccttagtccaatgctgaagaaggacaaactcttaaggggagctaacttcgcctccgcgggtattggaatccttaacgacaccggaatccagtttctgaatattattaggatcacaaagcagctagagtacttcgagcagtacaaggttcgagtaagcgggttggtcggagaagaagagatgaatcggctcgtgaacggagctcttgtcctaataacacttggaggcaatgatttcgtcaacaactactacttggtccctttctctgcaagatctcgtcaattctctcttcctgactacgttgtctttgtcatttctgaataccgcaaagtcttacggaaaatgtacgatttgggtgctcgacgtgtccttgtgactggaacaggaccaatgggttgcgtcccggccgagctggcgcaacgtagccgcaacggcgagtgtgctaccgaactccaacgagccgcgtcactattcaacccacaactaattcaaatgataacagacctcaacaacgaagttggatcttcggccttcattgccgctaatactcaacaaatgcacatggacttcattagcgacccacaagcatatggattcgtcacgtcgaaggtggcttgttgtggacaagggccgtacaatgggatagggctatgcactccattatcaaatctttgcccaaacagagatctctttgccttttgggatccttttcacccatcagaaaaagcaagtagaatcatagctcaacaaatcctcaatggctctcctgaatacatgcatcccatgaatcttagcaccatcctcaccgttgattccatgacctaa

SEQ ID NO: 100 - DNA, 1656 bp, Arabidopsis thaliana
atggaggtcaaaagcgtgaacaccacggcgatgatacttggtctattttttctaatcagcttcgtcgctgcggaagatccgtataaattcttcgaatggcacgtaacttatggtaacatatctccgctcaaggttgcacaacagggtatattgatcaatgggaagttcccaggaccggacatcgccgctgttaccaatgataatctcatcattaacgtattcaaccatctcgacgaacctttccttatatcatggagcgggattcgaaactggaggaattcataccaggacggagtgtacgggacgacgtgtccaatcccgccggggaaaaactacacctacgctcttcaggttaaagatcagattggaagtttctactacttcccctctctcggctttcacaaagccgccggtggatttggagctattcgtatctccagccgccccagaatccccgttccattcccagcccccgctggtgattacaccgttctcatcggtgactggtacaaaaccaaccataaggacttgagagcacaactcgataatggtggaaagcttccattcccggatggaattctcatcaatgggcgcggtagtggcgccaccctcaacattgaaccaggtaagacttatagactgaggatatcaaatgttggattgcaaaactctctcaacttccgaatccaaaaccacaagatgaagttagttgaggtcgaagggacacacactattcagactccattctcttcgcttgatgttcacgtcggtcaatcttactcggtccttataacagctgaccagcctgcaaaagattattacattgtggtctctagtaggtttacctcgaagatccttattaccgctggtgttcttcattacagtaattctgctggacctgtttctggacctattccagaagcaccaattcagttgcgctggtcttttgaccaagcacgagccatcaagaccaaccttgcagcgagtggacctaggccaaacccacaaggtacataccactatggcaagataaaagtcactcgaacaatcaaacttgctagctctgctggaaatatcaatggcaagcaacgatacgcggtgaatagtgcatcattctacccaacagacacacctttgaaactagcggactacttcaaaattgccggtgtatacaaccctggaagcatacctgatcagcccacacatggagcaatataccctgtcacatctgttatgcaaactgattacaaagcttttgtggagattgttttcgagaattgggaagatattgtccagacctggcacctcgacggttactctttcttcgtggttgggatggaacttgggaagtggagtgctgccagtagaaaagtctacaatctaaacgacgcagtctcacggtgcactgttcaggtgtatccaagatcatggactgccatatacgtatcactggacaatgtaggaatgtggaacctaagatcagagttatgggaaagacaatacctgggacaacagttttacatgcgtgtttacacaccctccacttccctcagagatgagtacttgatcccgaagaacgctcttctctgcggcagggccactggccaccacaccacgacacccggtcctctgagtgaaggaagtgagaggttttga

SEQ ID NO: 101 - DNA, 1785 bp, Arabidopsis thaliana
atggcgaaattaaatcgttccaacattggtctctcactgttactatctatgttcctcgcaaactttatcaccgatcttgaagcttcttctcatcaagatctcaaccaaccgtaccggaccggttatcactttcaacctctcaaaaattggatgaacgatcctaatggaccaatgatatacaaaggaatataccatcttttttaccaatataacccatacggtgccgtttgggatgtgagaatcgtgtggggacactccacgtcagttgacttagtcaactggatttcacaacctccagcttttaatccatctcagccgtcagatatcaacggttgttggtcaggctccgtcacgattctaccaaacggcaaacctgtgatcctctacaccggcattgaccaaaacaaaggtcaagtccaaaacgtcgccgttccggttaacatctctgatccttatctccgagaatggtcaaaaccgccgcaaaatcctctaatgacaactaacgcggttaacggaattaacccggaccggtttcgtgatccgaccaccgcgtggcttggacgtgacggagaatggcgagtaatcgtcggaagctcgacggacgatcgacgaggattagcgattctttacaaaagcagagatttcttcaactggacgcaatcaatgaagcctttacattacgaagacttaaccggaatgtgggaatgtcctgattttttcccggtttcgataaccggatcggacggtgtagaaacgtcgtcggttggtgagaatgggattaagcatgtgcttaaagtgagtttgattgagacattgcatgattattacacgattgggagttatgatcgtgagaaagatgtttacgtaccggatcttgggtttgtgcaaaacgaatcagctccgaggttagattacgggaaatattacgcgtcgaaaacgttttacgatgatgttaaaaaacgaaggatcttgtggggttgggttaatgaatcgtctccagctaaagatgatattgagaagggttggtctggtcttcagtcatttccgaggaaaatatggctcgatgaatcaggaaaggaattgctacagtggccgattgaagagattgagacattgcgtgggcaacaagtcaactggcaaaagaaagttctcaaagcaggatctactctccaagttcatggtgtcactgctgcgcaggcagatgttgaggtatcgttcaaggtgaaggaattggaaaaggcggatgtgattgaaccgagttggaccgatccacaaaagatatgtagtcagggagatttatcggttatgtcgggtttaggaccatttggtttgatggttttggcatccaatgacatggaagagtacacgtccgtttacttcagaattttcaagtcaaatgacgatactaacaagaagactaaatacgtggtgttgatgtgcagtgaccaaagcagatcatcgttaaatgatgaaaatgataaatcaacctttggtgcttttgttgcgatagacccttctcaccaaacaatttctcttaggactttgattgatcactcgatagtggagagttatggtggaggaggcagaacatgtataacctcaagagtgtatccaaaattggcaatcggagaaaatgcaaatctgtttgtcttcaacaaaggcactcaaagtgttgatatcttgaccctaagtgcttggagtttaaagtctgctcaaatcaatggcgacttaatgtcaccatttattgagcgtgaagagtcacgctcacctaatcatcagttttga

SEQ ID NO: 102 - DNA, 1455 bp, Arabidopsis thaliana
atgacttctcttttcttctttgttctccttttctcgtctcttctcataagcaatggcgatgccaacccaaattacaaagaagctctctccaagtcattgctcttcttccaaggtcagcgatctggtcctcttcctagaggccaacaaatttcctggagggctagctctggcctttccgatggctctgctgctcatgtggacttaaccggcgggtactatgacgcaggagacaacgtcaagttcaatttaccaatggcgtttaccaccacaatgctctcatggagcgcactggaatacggtaaacggatgggtcctgagctggaaaatgcacgtgtgaacatccgttgggccacagattatctgctgaaatgtgccagagccacgccggggaagctttatgtcggtgtaggagatcctaatgttgatcacaaatgctgggaacggcctgaagacatggacacaccacgtacagtttactctgtatccgcttccaatcctggttctgatgtcgcagctgaaacagcagcagctctagctgcagcttctatggttttcagaaaagttgattccaagtattcacgtttgctgctcgcaacagctaaggatgtgatgcagtttgccattcagtaccagggagcttacagtgattccctttcctcatctgtctgtcctttctactgctcctactctggttacaaggacgagctaatgtggggtgcgtcatggctgctaagagcaacgaataacccgtattacgcaaacttcataaaatctttaggaggtggagatcagcctgacatcttcagctgggacaataaatatgctggtgcctatgttcttctctcacggagagcattacttaacaaagacagcaactttgaacaatataagcaagcagctgagaatttcatctgcaaaatccttccagattctccttcttcctctacccaatacactcaaggaggattaatgtacaagctacctcaaagcaatcttcagtacgtaacctccataacattcttgctcacaacttacgccaaatacatgaaagccacaaaacacacattcaattgcggaagctccgttatcgtccccaacgccttgataagcctatcgaagcgacaagttgattacatactcggagataacccaatcaaaatgtcatacatggttggattctcttccaatttccctaagagaatccaccacagagcatcttctcttccttcacacgcacttcgttctcaatcgttaggctgcaatggtggattccaatcgttctacactcaaaaccctaaccctaacattctcaccggagcaatcgtaggaggtccgaatcaaaacgatgggtatccagatcagagagacgattatagtcacgcggaaccggcgacttatataaacgccgccttcgtcggacctttggcgtacttcgccgccggccgttcgacttga

SEQ ID NO: 103 - DNA, 1422 bp, Arabidopsis thaliana
atgaaagtgaacgaggaaaacaacaagccgacaaagacccatgtcttaatcttcccatttccggcgcaaggtcacatgattcccctcctcgacttcacccaccgccttgctctccgcggcggcgccgccttaaaaataaccgtcctagtcactccaaaaaaccttccttttctctctccgcttctctccgccgtagttaacatcgaaccacttatcctcccttttccctcccacccttcaatcccctccggcgtcgaaaacgtccaagacttacctccttcaggcttccctttaatgatccacgcgcttggtaatctccacgcgccgcttatctcttggattacttctcacccttctcctccagtagccatcgtatctgatttcttccttggttggaccaaaaacctcggaatccctcgtttcgatttctctccctccgctgctatcacttgctgcatactcaatactctctggatcgaaatgcccaccaagatcaacgaagatgacgataacgagatcctccactttcccaagatcccgaattgtccaaaataccgttttgatcagatctcctctctttacagaagttacgttcacggagatccagcttgggagttcataagagactcctttagagataacgtggcgagttggggactcgtcgtgaactcgttcaccgccatggaaggtgtttatctcgaacatcttaagcgagagatgggccatgatcgtgtatgggctgtaggcccaattattccgttatctggggataaccgtggtggcccgacttctgtttctgttgatcacgtgatgtcgtggcttgacgcacgtgaggataaccacgtggtgtacgtgtgctttggaagtcaagtagttttgactaaagagcagactcttgcactcgcctctgggcttgagaaaagcggcgtccatttcatatgggccgtaaaggagcccgttgagaaagactcaacacgtggcaacatcctggacggtttcgacgatcgcgtggctgggagaggtctggtgatcagaggatgggctccacaagtagctgtgctacgtcaccgagccgttggcgcgtttttaacgcactgtggttggaactctgtggtggaggcggttgtcgccggcgttttgatgctgacgtggccgatgagagctgaccagtacactgacgcgtctctggtggttgatgagttgaaagtaggtgtgcgtgcttgcgaaggacctgacacggtgcctgacccggacgagttagctcgagttttcgctgattccgtgaccggaaatcaaacggagaggatcaaagccgtggagctgaggaaagcagcgttggatgcgattcaagaacgtgggagctcagtgaatgatttagatggatttatccaacatgtcgttagtttaggactaaacaaatga

SEQ ID NO: 104 - DNA, 1506 bp, Arabidopsis thaliana
atgagtagtcatgatacataccaaaaactcattttgttttgcctatccatattctttcttcaaaacatattgaagaatgtggagggcttggcatgtaactggggtacacaagcgagccatccactaccaccaaacatagtggtgaaactccttagggacaatgggttcaacaaagttaagctatttgaagctgaccctggtgcactcagagctcttggtaaatccggtattcaagtcatggtcggtatccccaacgatctcttggcaactatggcatccactgttaccaacgcagagctttgggttcaacaaaacgtctctcaatacatctctagatatggaaccgacataagatatgtagcggtggggaatgagccattcttgaagacctataataacagattcgtccgatcaacatatccagcgctgcaaaacgttcaagcagctctagttaaagctggtcttggtcggcaagtcaaagtgacggttcctcttaatgccgacgtctacgaatccagcgatggtcttccttcttccggcgattttcgatcagacataaaaaccttaatgatctctattgttcgattcctagctgattccgtctcaccaatcaccttcaacatctaccctttcctctctctcaacgctgatccaaatttcccgcgcgaatacgccttcttcccaaacggaggcggcggcggtggagctaagcccgtcgtcgatggttcaatctcttacacgaacgtcttcgacgcaaatttcgacactttagtctcggcgctggagaagaacggatttgatgcgaacaaaattgaaatcatcgtcggagaagtcggatggccaaccgacggtgatcagaacgcaaatcctgcaatggctcagagattcaatcaagggttattgaatcgtatccttcaaggacaaggtacgcctcgccggagaatggcgccggaagtttatatattctcattagtagacgaagatgccaagagcattgatcccgggaaattcgaaagacattggggaatattctcttatgacggcgccgttaagtatcctctgagtctcggtaacggccgtccgttggttccgactaaaggtgttcgttaccaggcacgtgagtggtgcgtgctctccactcaggctgcgggtaacggtgctgccacttggcaggcttctgctacgtacgcgtgtcaaaatgccgactgcacctcgctcgggccgggttcctcctgcgccgccttggacccgaccgcgaatgcttcttatgcgttcaatatgtattttcaaaaaatggatcatcgtcgtggctcatgtgattttaacaatcttggggttgttactaagatagatccgtcaagtggttcctgtaggtttcctatcgaaatcgacacgagcaggcagcagatgtcgaatccgccaccgaggaattcaggtgcatctgaagcaaagtataggttgggggcagccgtggtgatggtaatctgtttggtgttctctaattga

SEQ ID NO: 105 - DNA, 1161 bp, Arabidopsis thaliana
atggttgttgctatggaccaacgcaccaatgtgaacggagatcccggcgccggagaccggaagaaagaagaaaggtttgatccgagtgcacaaccaccgttcaagatcggagatataagggcggcgattcctaagcactgttgggttaagagtcctttgagatcaatgagttacgtcgtcagagacattatcgccgtcgcggctttggccatcgctgccgtgtatgttgatagctggttcctttggcctctttattgggccgcccaaggaacacttttctgggccatctttgttctcggccacgactgtggacatgggagtttctcagacattcctctactgaatagtgtggttggtcacattcttcattctttcatcctcgttccttaccatggttggagaataagccaccggacacaccaccagaaccatggccatgttgaaaacgacgagtcatgggttccgttaccagaaagggtgtacaagaaattgccccacagtactcggatgctcagatacactgtccctctccccatgctcgcatatcctctctatttgtgctacagaagtcctggaaaagaaggatcacattttaacccatacagtagtttatttgctccaagcgagagaaagcttattgcaacttcaactacttgttggtccataatgttcgtcagtcttatcgctctatctttcgtcttcggtccactcgcggttcttaaagtctacggtgtaccgtacattatctttgtgatgtggttggatgctgtcacgtatttgcatcatcatggtcacgatgagaagttgccttggtatagaggcaaggaatggagttatctacgtggaggattaacaacaattgatagagattacggaatctttaacaacattcatcacgacattggaactcacgtgatccatcatctcttcccacaaatccctcactatcacttggtcgacgccacgaaagcagctaaacatgtgttgggaagatactacagagaaccaaagacgtcaggagcaataccgatccacttggtggagagtttggtcgcaagtattaagaaagatcattacgtcagcgacactggtgatattgtcttctacgagacagatccagatctctacgtttacgcttctgacaaatctaaaatcaattaa

SEQ ID NO: 106 - DNA, 1014 bp, Arabidopsis thaliana
atggtggtgatgaaggcacagccactggttccagcaattttcatatttggtgattcggtggttgatgtgggaaacaacaatgatatctacacaatcgtcaaagctaatttccctccttatggaagagatttcacaacccatacacccaccggacgcttctgcaatggaaagttagctactgacttcaccgctgagaatcttgggttcaaatcatacccacaagcttatctaagcaaaaaggcaaaaggcaagaaccttttgattggagctaatttcgcctctgcagcctctggttattacgatggcacagccaagctctacagtgcaatatcgttgccgcaacagctagaacattacaaagactacattagtcgaatccaagaaatcgcaacctcaaacaacaattcaaacgccagtgccataatctccaatggcatctatatcgtcagcgcagggagcagcgacttcatacaaaactactatatcaaccctctcctctacagagaccaatcacctgatgagttctctgatctccttatcctctcctactccagttttattcagaatttatattcgttaggagcaagaaggatcggagtgactacacttccgcccctcggttgtttaccggcggccataactgtagtgggtccacatgagggtggatgctcggagaagcttaacaacgacgcaatctccttcaacaacaaactcaatacgacgtcacaggatctcaagagaaacctcattggactcaatttagtcgtctttgatatctatcagcctctctatgatcttgccaccaggccatcagaatttggatttgcagaggcaagaagagcttgttgtggaacagggttactagagacatcaatactgtgcaacccaaaatcagtaggaacatgtaacaatgcaactgagtatgtcttttgggacggatttcatccaacggaagctgctaacaagattctcgctgacaatctcttggtctctggcatctctctcatctcctga

SEQ ID NO: 107 - DNA, 1536 bp, Arabidopsis thaliana
atggacatcatctcaggacaacctctatttctcatcttctgctttatcttatcatgtcttcttttcttcaccaccgcacgatctcgacgtagcccttgtcaattgtccaagtcacctccggggcctccacggttacccataattggaaacattcatctggtcggaaagaacccacatcactcattcacggacctctcaaaaacatatggaccagtcatgagtcttaagcttggatgtttaaactcagtggtcatagcttcacgagacgctgtgagagaagtactaaaaacacacgaccaaatcttgtctggacggtacataagtgaagcgaccaaatccaacaatcatcatgaattttccgttggctggattcatccatcgtcatctcgttttagaatgttgaggaaattgtcggctactcagctgttctcaccgcagtgtatccaggctaccaaagctctgaggatgaagaaggtgcaggaacttgtcaacttcctgagtgaaagctgtgagagagaagaagctgttgatatttctcatgtatccttcgtcacagctctcaatatcatatcgaatattttgttctcagtcaatctcggtagctacgattcaaaaaattccagtgcgtttcaagagatggtgatcggttaccaggaatctatcggaaatccagaccttgctaacttcttcccatttatgagatttcttgacttgcaaggtaacagtaagaagatgagggagtcctcagggagattgcttcaggtattcagagagttttatgatgctcggattgtggagaaatcatcgcgttcagttgagaaagatgtttcgagtaaagacttcctggatgtgcttatcgatctccaacaaggagatgaaactgaaatcaacatcgacgagatcgaacacctacttctcgatatgtttgtagcaggcacagatacaaactcaagtaccgtggaatgggcaatggcagagttacttggaaaccctaaaacgatgacaaaagttcaagacgagatcaatcatgtgatagggcaaaacggtgactttcaagagtctgatatctcaaaactgccgtatttaaaagcggtcgtaaaagaaactttccgactacaccctgctgctccatttctcctccaaagaaaagctgaaaccaacgtagagattcttggattcactgtgcttaaagactctcaggttcttgtgaacgtgtgggccataggacgagacccacttgtatgggaaaatccgacccattttgagccagagaggtttttggggaaagagattgatgtaaaaggtacagattatgagcttacaccgtttggggctgggcgtagaatttgtccgggactgcctttggctatgaaaacagtgcatctcatgcttgcttctcttctctatacctttgaatggaagcttccaaacggtgtcggttcagaggatttggacatggaagagacctttggtctcacagtgcacaagacaaacccgttacttgccgtgcctctgaagaaacgagccataaattaa

SEQ ID NO: 108 - DNA, 1572 bp, Arabidopsis thaliana
atggcgagttataatcttcgttcacaagttcgtcttatagcaataacaatagtaatcatcattactctctcaactccgatcacaaccaacacatcaccacaaccatggaatatcctttcacacaacgaattcgccggaaaactcacctcctcctcctcctccgtcgaatcagccgccacagatttcggccacgtcaccaaaatcttcccttccgccgtcttaatcccttcctccgttgaagacatcacagatctcataaaactctcttttgactctcaactgtcttttcctttagccgctcgtggtcacggacacagccaccgtggccaagcctcggctaaagacggagttgtggtcaacatgcggtccatggtaaaccgggatcgaggtatcaaggtgtctaggacctgtttatatgttgacgtggacgctgcgtggctatggattgaggtgttgaataaaactttggagttagggttaacgccggtttcttggacggattatttgtatttaacagtcggtgggacgttatcaaacggcggaattagtggacaaacgtttcggtacggtccacagatcactaatgttctagagatggatgttattactggaaaaggagagattgcaacttgttccaaggacatgaactcggatcttttcttcgcggtgttaggaggtttgggtcaattcggcattataacaagagccagaattaaacttgaagtagctccgaaaagggccaagtggttaaggtttctatacatagatttctccgaattcacaagagatcaagaacgagtgatatcgaaaacggacggtgtagatttcttagaaggttccattatggtggaccatggcccaccggataactggagatccacgtattatccaccgtccgatcacttgaggatcgcctcaatggtcaaacgacatcgtgtcatctactgccttgaagtcgtcaagtattacgacgaaacttctcaatacacagtcaacgaggaaatggaggagttaagcgatagtttaaaccatgtaagagggtttatgtacgagaaagatgtgacgtatatggatttcctaaaccgagttcgaaccggagagctaaacctgaaatccaaaggccaatgggatgttccacatccatggcttaatctcttcgtaccaaaaactcaaatctccaaatttgatgatggtgtttttaagggtattatcctaagaaataacatcactagcggtcctgttcttgtttatcctatgaatcgcaacaagtggaatgatcggatgtctgccgctatacccgaggaagatgtattttatgcggtagggtttttaagatccgcgggttttgacaattgggaggcttttgatcaagaaaacatggaaatactgaagttttgtgaggatgctaatatgggggttatacaatatcttccttatcattcatcacaagaaggatgggttagacattttggtccgaggtggaatattttcgtagagagaaaatataaatatgatcccaaaatgatattatcaccgggacaaaatatatttcaaaaaataaactcgagttag

SEQ ID NO: 109 - DNA, 1629 bp, Arabidopsis thaliana
atgatggcggtgggcagatccggaggcaccatcctattgttctgcctatcattcttcgccgcggtaaccgcggagagtccataccgattctttgactggaatgtaacatacggcgacatttacccactcggtgttcgtcagcagggaatattgattaatgggcaatttccgggaccagacattcacagtgtgacaaacgacaatctcatcattaacgtacacaacagcttagacgagcctttcttaatctcatggaacggagtacaaaacagaagaaattcttatgttgatggaatgtacggaaccacgtgtccaattccaccgagaagcaactacacatacattttgcaagtgaaagaccaaattggaagtttctattacttcccatctcttgcctttcacaaggcagctggtggattcggaggtatcagaatccttagccgtcctggaattccagttccatttgctgaccctgcaggagattacactgtcctcattggagattggtacaaatttaatcacacggatttgaagtctcgtcttgatagaggaaggaagttaccttcgcctgatggtattcttatcaatggccgaagtaacggtgctaccttaaacgttgaacaaggaaaaacataccgattgaggatatcaaacgttggattacaagattctctgaacttccgaatccaaaaccacagaatgaagcttgtggaagtcgaagggacgcacacacttcaaaccatgttttcctctcttgacgttcacgttggccagtcttactccgttctaattactgctgaccaatctcctcgtgactactacgtggttgtttcgtctcgattcacggataaaatcataaccaccaccggggttcttcgctacagtggctcgtctacccctgcttctggtcctattcctggcggtcccactattcaggttgattggtccttgaaccaagcacgtgccatcagaaccaatttgacagctagtggaccaagaccaaacccgcaaggctcataccattatggtcttataccgctcattaggacaattgtgttcggtagttcagccggacagataaacgggaaacaaagatatggtgtcaatagtgtgtcatttgtgccagctgatacccctctaaaactggctgacttcttcaagattagcggtgtctataagatcaacagcatctcagacaaacccacatatggaggtttataccttgacacctcagttttgcaagtcgactatcgaacctttatcgagattgtattcgagaaccaagaagatatcgtccaaagttatcatctcaatggttactccttttgggtggtcgggatggatggtggacagtggaagacaggaagcagaaatggttataatttacgcgatgcagtttcacgttccacagtccaagtgtacccaaaatcatggacagccatatacattgcattagacaacgttggaatgtggaacttaagatcagaattttgggcaagacagtacttgggacaacaactttacttacgtgtcttcacgtcatctacgtctttgagagatgagtaccctatcccgaagaattcgcgtttgtgcggccgggcaagaggacgacatactaggcctttgtaa

SEQ ID NO: 110 - DNA, 1539 bp, Arabidopsis thaliana
atggatacttccctcttttctttatttgtttcaatccttgttttcgtttttatcgctcttttcaagaaatcaaagaaaccaaaatatgtaaaagctcctgcaccaagtggtgcatggcccatcattggtcatctccaccttctcggtggcaaggaacagcttctttaccgaaccttaggaaaaatggctgaccactacggtccagccatgtcgctacgacttgggagcagtgaaacatttgttgggagcagttttgaggtggctaaagattgttttactgtgaacgacaaagccttggcttctcttatgactgcagccgcaaagcacatgggttacgttttctggctcgagatgcgtaaaatcgcaatgatcgagctcctttctaaccggcgccttcagatgctcaacaacgttcgtgtttctgagatctcaatgggtgtgaaagatttgtattccttatgggtcaagaaaggtggttcagaaccagtaatggttgatctaaagagctggttagaggacatgattgcgaacatgatcatgagaatggtggccggaaagcgatactttggaggcggcggcgcagaatcctcggaacataccgaagaggcaaggcaatggagaaagggcatcgcgaaattctttcacctcgtcggtatattcaccgtgtctgatgcttttccgaaactagggtggcttgatttgcaaggacatgagaaggagatgaagcagacaagaagagagttagatgtgatccttgaaagatggattgaaaaccatcgacaacaacgcaaagtttcaggaacgaaacacaatgattcagacttcgtcgacgttatgttgtcgcttgcagaacaaggcaaactctcgcatcttcaatacgatgccaatacgtgcatcaaaactacctgcctggcactaattcttggaggaagtgagacttcaccatcaacccttacatgggccatttctcttcttctaaacaataaggacatgttaaagaaagtacaagatgagatagacatccacgtcggcagagacaggaacgttgaggattcagacataaaaaatctggtatatcttcaagcgattatcaaagaaacattgagattgtatccagctgctcctctcttaggccatcgagaggcgatggaagattgcacggtcgcaggttacaacgttccgtgcggcacaagactcatagtgaacgtatggaaaatccaaagagatccgaaagtttatatggaaccaaacgagttcagaccagagaggtttatcacaggagaagcaaaagattttgatgttagaggacaaaactttgagctgatgccatttggttcgggaagaagatcatgcccaggcccttcattggccatgcaaatgcttcatttaggtcttgctcgtttccttcattcatttgaagtgaaaactgtattggataggcctgttgacatgagtgagagccctggcttaaccattactaaagctacgcctcttgaggttctgatcaatccacgtcttaagagagagctttttgtgtga

SEQ ID NO: 111 - DNA, 1467 bp, Arabidopsis thaliana
atgggatcccgttttgtttctaacgaacaaaaaccacacgtagtttgcgtgccttacccagctcaaggccacattaaccctatgatgaaagtggctaaactcctccacgtcaaaggcttccacgtcaccttcgtcaacaccgtctacaaccacaaccgtctactccgatcccgtggggccaacgcactcgatggacttccttccttccagttcgagtcaatacctgacggtcttccggagactggcgtggacgccacgcaggacatccctgccctttccgagtccacaacgaaaaactgtctcgttccgttcaagaagcttctccagcggattgtcacgagagaggatgtccctccggtgagctgtattgtatcagatggttcgatgagctttactcttgacgtagcggaagagcttggtgttccggagattcatttttggaccactagtgcttgtggcttcatggcttatctacacttttatctcttcatcgagaagggtttatgtccagtaaaagatgcgagttgcttgacgaaggaatacttggacacagttatagattggataccgtcaatgaacaatgtaaaactaaaagacattcctagttttatacgtaccactaatcctaacgacataatgctcaacttcgttgtccgtgaggcatgtcgaaccaaacgtgcctctgctatcattctgaacacgtttgatgaccttgaacatgacataatccagtctatgcaatccattttaccaccggtttatccaatcggaccgcttcatctcttagtaaacagggagattgaagaagatagtgagattggaaggatgggatcaaatctatggaaagaggagactgagtgcttgggatggcttaatactaagtctcgaaatagcgttgtttatgttaactttgggagcataacaataatgaccacggcacagcttttggagtttgcttggggtttggcggcaacgggaaaggagtttctatgggtgatgcggccggattcagtagccggagaggaggcagtgattccaaaagagtttttagcggagacagctgatcgaagaatgctgacaagttggtgtcctcaggagaaagttctttctcatccggcggtcggagggttcttgacccattgcgggtggaattcgacgttagaaagtctttcatgcggagttccaatggtatgttggccattttttgctgagcaacaaacaaattgtaagttttcttgtgatgaatgggaggttggtattgagatcggtggagatgtcaagaggggagaggttgaggcggtggttagagagctcatggatggagagaaaggaaagaaaatgagagagaaggctgtagagtggcggcgcttggccgagaaagctacaaagcttccgtgtggttcgtcggtgataaattttgagacgattgtcaacaaggttctcttgggaaagatccctaacacgtaa

SEQ ID NO: 112 - DNA, 1023 bp, Arabidopsis thaliana
atggatctccgattcttggcgtccttgacccttcttctcggtctattcttcgtcaatacaaatccaacaggtggacaagtcggcgtttgctatggaagaaacggcaacaacctcccttcaccagcagaaaccattgcgctcttcaaacagaaaaacatccaacgagttaggctatacagtccggaccacgacgttctagccgccctacgtggctccaacatcgaggtaacgctgggtcttcccaactcttacctacagagcgtggcctcgagccaatcacaagctaacgcgtgggtacaaacctacgtcatgaactacgcgaatggcgtcaggttccgttacatatctgttgggaatgaagttaaaatctccgactcttacgcacagttcctagtccctgccatggaaaacattgaccgggcggttttagcagccggactcggtggtcgtatcaaggtatccacatcggtagacatgggagtgctccgagagtcttatccaccatcgaaaggttcgtttaggggagatgttatggtggtaatggaaccaatcatacgtttcttggtaagcaagaactctcctttactcttaaacctctacacttacttcagctacgcgggcaatgtaggccaaatccggctcgattacgctctcttcacggctccttcaggaatcgtttcggaccctcctagatcttaccaaaacctatttgatgcgatgctcgatgcgatgtactcggctctagagaaatcgggtggcgcatcattggaaatagttgtggcggagactggatggccaacgggaggaggaaccgatacaaacatagagaatgcgagaatttataacaataatttgattaagcatgtgaagaatgggacaccgaagagaccagggaaagaaatcgagacatatttatttgccatttatgacgagaatcaaaagccgactcctccttatgttgagaagttttggggattgttctatcccaacaagcagcctaagtatgatattaacttttattga

SEQ ID NO: 113 - DNA, 1080 bp, Arabidopsis thaliana
atgttcctcgtgttacactatctcactaatcaaaccaattccgattcttacctcggaggacataccggaattacaactccgttgcggccaccaccaccaagaaagacatactgcagcaagtcatcttcatctccacctccgccgaaatacatgtatgtaaccggtgtgcctggggaactctaccggaccgagccagatgaccaatggggatataattctagtgtaaaccgaaatctggttaagtgtctcttggttattgtaattgtggggtttggagttataaattttcccaccttgatatcggaaaaattatctgttgagctgaaattgaaattggattttccgttaggtttacctggtattgaaattagaattgaattttcggttaagtttacctgggatcagaggaataagttgactcaggaagtttcttctgctttcagcggcaagctcaacatccttaacaatcttcgaaccattctgccacacttttatcagttaagattaccagcaccggaggaaatcgcgtcactggttgcttttctttgccttcctgcagcctcctacactacaagacaggaagagctaaaagcatgcttaaatgattgcaaatccagtggtttagtggtgtctggttcggttagagatcagagggataagttgattcagtggcaagctcaacattcttttttatgtcgtttcatcatcatattttttttcttgcagaaatccaaggcatcggatgcaagtgaggaaactatcaatactacattcgatatcaatgtctttgggacgataactcttataaagttggtcactcctcatatgctaaaacaaggaggcggtcattttgttgtgataagcagtgctgcaggaaaggtaccatcacctggacaggctatatattctgcttcaaaacatgctctgcacggctacttccacagcttgcgttctgagttctgtcaggagggaatcaaagtgaccgtcgttattcctggtccaatagaaacgttgaatggtacaggaacatcaacttcggaagacaagaagtctcatgagaagcgtgtgtcatctgaatga

SEQ ID NO: 114 - DNA, 2829 bp, Arabidopsis thaliana
atgtcatcttcatctcaagctatgcttcaaaagtcggattccatcgctgagaaaatgcctgatgcattgaaacaaagccggtaccacatgaagagatgttttgccagctttgttggaggaggaaagaagctgatgaagcgtgagcatttgatgaatgagatagagaaatgtatagaagatagccgtgaacgcagtaagatccttgaggggctgtttggttacattctcacttgtactcaggaagcagcagtggttccaccgtttgttgcactagccgcaaggccaaatcctggtttctgggaatatgttaaggtcaactctggagatttaacagttgatgaaatcacagccactgattacttaaagctcaaggaatctgttttcgatgagtcatggtctaaagatgaaaatgcactggagatagactttggagcgattgatttcacatctcctcgtcttagtctttcttcttcgattggaaaaggagctgattacatctctaagtttatatcttctaagcttggaggcaaatccgataaactagaacctttgttgaactatctgcttcgccttaaccatcacggagagaatctcatgatcaatgacgatctcaacacggttgcaaagctccagaaatctctcatgcttgctgtgattgttgtctcgacttactcaaaacacacaccttatgaaacttttgcacaaaggttgaaggagatgggattcgagaaaggttggggagatacagcagagagagtgaaagaaacaatgattatcctttcagaagttcttgaagcaccagacaatgggaagttagatttgctctttagcagacttcccacagtgttcaacgttgtgatattctctgtccacggctattttggtcagcaagacgtactcggattacccgataccggaggccaggttgtttacattctggatcaagtaagagctttggaggaagagcttcttattcgaattaaccaacaaggtctcggattcaagcctcagattcttgtggtgacacggttaataccggaagcaagaggaacaaagtgtgatcaagaactagaagccattgaaggaaccaagcattctcatattctcagggttccttttgttacaaataaaggagtccttcgtcaatgggtttcccgattcgatatctacccttacctcgagagatttactcaggacgcaacgagcaagattcttcaacgccttgattgcaagccagacctcatcattggaaactacacagatggaaacttggttgcatctctaatggccaccaaacttggtgtcactcagggaacgatcgctcatgcgttggagaagacaaagtatgaagattcagatgcaaagtggaaggaattagatccgaaataccatttctcatgtcagttcacagctgatttaatcgcaatgaatgttactgacttcatcattaccagcacatatcaagaaatcgcaggaagcaaggacaggccaggacagtacgagagtcacactgccttcacaatgcctggtttatgtagagttgtctctggcattgatgtctttgatccaaagtttaacattgctgctcctggtgcggatcaatctgtatacttcccttacacagagaaggataaacgattcaccaagtttcatccttcgatacaagaactgctttacaatgagaaagacaatgctgaacacatgggatatcttgcggatagagagaaaccgataatcttctcaatggcgagacttgacacggtgaagaacataaccggtttggttgaatggtatggcaaagacaagagacttagagaaatggctaaccttgtagtcgttgctggattcttcgacatgtcaaaatctaatgacagagaagaaaaagctgagatcaagaaaatgcatgatctaattgaaaagtataagctcaaggggaaattcagatggatcgctgctcaaactgatagatacagaaacagtgagctatacaggtgcattgctgatacaaaaggagtctttgttcagcctgctttgtatgaagcttttggcttaaccgttatcgaagccatgaactgtggactaccaacgttcgccacaaaccaaggtggaccagccgagataatcgttgatggtgtctctggtttccacattgatcccaacaatggtgatgaatctgttacaaaaattggagatttcttcagcaaatgccgttcagatggtttgtattgggataatatctctaagggtggtctcaaacgcatctatgagtgttacacatggaagatttatgcagagaagttgcttaaaatgggaagcctttatggattttggagacaggtgaacgaagatcaaaagaaagcgaagaagcgatatattgaaatgctttacaatctccagttcaaacaattgaccaagaaagtgacaatcccggaagataaacctctgcctctgagactggcttcactccgtaaccttcttcccaaaaaaacaacaaatcttggagcaggaagtaagcaaaaggaagttacagaaacggaaaagacgaaacagaaaagtaaagatggtcaagaacaacatgatgtaaaggtcggagaaagagaggtaagagaaggcttgcttgcagctgacgcatcagagagagtgaagaaagttttagaatcttcggaagagaaacagaagctagagaagatgaagattgcgtatggacaacaacatagccaaggagcttcgccggttcgaaacttgttttggtcagtcgttgtttgtctctatatctgctacattttgaagcagaggttctttggtgctaactcggctcaagagtattaa

SEQ ID NO: 115 - DNA, 1605 bp, Arabidopsis thaliana
atggaaggagtaaactcttcaagctctatatccgacctagacgaattggctcggttacttgaccggccgagggtaaatattgaacggaaaagatcgtttgacgagaggtccttcagcgaaatgggaatcttcgacaacgttaattctcccggaggatgggaaactccggtgtcttcggctagaaactcgtttgagccacatcctatggttgcagaggcttgggatgctttgagacgatcattggtttactttcgtggccaaccggttggtactatcgctgcttatgaccatgctactgaggaagtcttgaattatgatcaggttttcgtaagagactttgttccaagtgcactagcttttctcatgaacggagaaccagacatagttaaaaactttctcctcaagacaattcaaatccaaggaagggagaaaagaatagaccgattcaagctcggtgaaggcgcaatgccggctagtttcaaggtcattcacgacccgatcaaggaaaccgactctatcaatgctgactttggcgagagcgcgattggaagagtggctccggtggactcaggtttctggtggatcattctccttagagcctacacaaaatccaccggagacacttctctagctgaaacatctgaatgtcaaaagggaatgagactcattctctctctttgtctctccgaaggtttcgatactttccctaccttactttgtgctgatggctgctccatgatcgatcgaagaatgggggtttacgggtatccgatagagatccaagctctcttcttcatggctcttagatcagcaatgtcgatgctaaagcacgacgcggaaggtaaagagttcatggagaggatagtgaagcggctacacgcgcttagcttccacatgagaagttatttctggctcgattttcagcagctcaacgacatttaccgttacaaaacagaagagtactcgcacacagcggttaacaagttcaacgttatccctgactcgatccctgagtgggtcttcgatttcatgcctctacgtggcggttactttataggaaacgttagtccagctcgtatggattttaggtggttcgctctaggcaactgcgtagcgatccttgcttctttagccacgcctgagcagtcggcttcaatcatggacttgatagaggaacggtgggaggagttggtcggagagatgccggttaaaatttgtcatccggcaatcgagagccatgagtggaggattgttaccggttgcgaccctaagaatactcgttggagttaccataacggtggttcttggccagtattgttgtggctattaacagctgcatgcataaagacgggacggccacaaatagcaagacgggccatagacctggcggaagcacggctgttgaaggatggttggccggagtactacgacgggaaatcaggaaggttcatcggaaaacaggcgaggaagtttcagacatggtctatcgccggttacttggtcgccaagatgttgttggaagatccttctcatcttggaatgatctcattggaagaagacaaacagactaaacctgtcattaagagatcttattcttggacttga

SEQ ID NO: 116 - DNA, 882 bp, Arabidopsis thaliana
atgggtcgtctttcatcaactctctgcctcacgtttctgattttggccacagttgcatttggtgtacctcctaaaaagtccattaatgttccatttgggaggaactacttccccacttgggcttttgatcacattaagtatctcaatggtggttctgaagtgcatcttgtcctcgacaagtacactggcactggctttcagtccaaaggttcctacttgtttggccacttcagtatgcacataaagatggttgctggtgactctgctggaactgtgaccgccttctatttgtcgtcccagaactcagaacatgatgagatagactttgagtttctagggaacagaactggccagccttacattttgcagactaacgtgtttacaggaggcgccggaaaccgtgagcaacgaatcaacctctggtttgatccttccaaggactatcattcctattcagttctctggaacatgtatcagattgtgttctttgtggatgatgtgccgatacgagtgttcaagaatagcaaagacgttggggtgaagtttccattcaaccaaccaatgaagatatattcgagtctgtggaatgcagacgactgggccacaaggggagggttggagaagaccaactgggaaaaagctccttttgtcgcgtcctacagaggcttccacgtcgatggatgtgaagcttcagtaaatgctaagttctgcgagacgcagggaaaacgttggtgggatcagaaagagttccaggacttggacgctaaccagtacaagcgtctcaaatgggttcgtaagagatacaccatctacaactattgcactgaccgcgtccgatttcccgtacctcctccagagtgccgcagagaccgcgacatatag

SEQ ID NO: 117 - DNA, 1224 bp, Arabidopsis thaliana
atggaagaagaaggcagcccagatatcatcatcgttggcgccggtatctccggcctttccaccgctgttggactacacaggcttgggatcagaagcatggtgctggaatcttcggagacactgagagcgacaggatttgcatttaccacttggttcaatgcttggaaggccatggaagctctcggcgtttctcagcatattcgcagtctccatgatcgccttgaaggatgggtggttggaacaatttctgcaggaactcctcccacagagatgctgtttccagaatccgaagaatatgagtctcgatgcgtacagaggaagctgttgttagaggctctagcaggtgagttgcctgaagagaccatcaggttttcgtctaaggttgttcatattgaattgtctggatgctacaagaaggttcatctctccgacgggaccattctcaaaaccaaggttttggtagggtgcgatggagtgtactcagtggttggtaagtggctaggcttcaaaaatcccgctacaactgcccggttagcaatccgagggctcacacattttccggaaggccatggatttgggaaaaggttcttccagttttatggagacggcgttcgttccggttttatcccatgtgaccacaacactgtctactggttcctaacccacacctccactgatatagatgaggagacaaattcggaaatcctcaaagagtttgtgctgaacaagatcaaagacttgcctgaaaacattaagaatgtggtggagaccactgatcttgatagcatggtgatgtctcaactgaagtaccgacctccatgggaactgctatggtcaaacatcacaaaagacaacgtgtgcgttgcaggagatgcacttcacccaatgactcctgatatcggacaaggaggttgctcagccatggaggatggagttatccttgctcgttgtctaggtgaagcgataaaggcaaagagtctgaaaggtgaaacagaagaaaatgaagaagagggttataagaggattgaagaaggtttgaagaagtatgcaggagaaaggaaatggagaagcattgatcttataacaacggcatatacagtaggattcatacagcagagcagagggaagtggatgaacatgttcagagacaggttcctgtcgtcttacctttctaggatgctgctgaaaaagtcccatttcgattgcggaagccttgtcccatga

SEQ ID NO: 118 - DNA, 1842 bp, Arabidopsis thaliana
atggcgtctagaccaggttttctcacggactggccatggacacctcttggaagctttaagtacttgttgttggccccgctggtttttgacagcatctactcatatgcaaccatacgagatcacgaaaaacttttgatagtggccgtgacggtgtggcggattgttcatagccaaatatggataagtttatcccgttaccaaactgcaaaaggaaccaagcggatcctgaacaagtccatagagtttgaccaagttgaccgagaacgaacctgggacgatcagatcatcttcaacactctcattgtttacttaaccaaagtgtacgtctcagggaccagtaccattcccttctggcgaaccgatggagtgatcttagtcgctctcctccatgctggtccggtggagttcatctactactggtttcatcgagcccttcaccaccacttcctctactctcgctaccattctcaccaccattcctccattgtcaccgagccgatcacttcggtggtacatccgtttgcagagcacatcggatatacgttaatcttggggctaccgctaataacgacttttatgtgtggaacggtctcggtagtctccattgccttatacctaacttacatagattttatgaacaatatgggtcactgcaactttgagctcattccgaaatttttattctctcttttacctccactcaagttcctctgctacactccctcgtttcattcgctccaccatacgcaattcaggacgaactactctctattcatgccaatgtacgactacatctatggcaccaccgacgagtgcagtgactcattatacgaaacatcgttggagaaagaagaagagaagcctgacgcgattcatcttactcatctaacatcactcgactctatttaccatctccggcttggctttgcttccctctcctctcacccgctctcttcccggtgttacctatttctcatgaagcccttcgctcttatcctctccttcattctcaggtccttctcttttcaaacctttgtcgtcgagagaaaccgcttccgtgatctcacacttcactcccaccttcttcccaagttctcctctcattacatgtcgcaccagcagaaagaatgtatcaacaaaatgatagaggcggctattcttgaagcggataagaagggtgtgaaagtaatgagtttgggactattgaaccagggtgaagaattaaatgggtatggagaaatgtacgtaaggaggcatccaaagctaaagataaggatagtggacggaggcagtcttgcagctgaggtggtgcttcatagcattcctgttgggaccaaagaggttctctttagaggccaaatcacaaaagttgctcgtgccattgtcttttctctttgccaaaatgccatcaaggtaatggtgttgcgcaaggaagagcattccatgctcgccgaattcttggacgataagtgtaaggaaaatcttatttggttggtgggagatgggctaagcacaaaagagcagaagatggcaaaagatggaactctatttcttcctttctctcaatttcctcctaaaacactacgaaaagactgcttttaccacaccactccggctatgattatccctcactctgcccaaaacattgattcttgtgagaattggctggggaggagagtgatgagcgcatggagagttggtgggatagtacacgcgcttgaagggtggaaggaacacgagtgcggtctcgacgacaattcaatcattaatcctcctagagtttgggaagctgctcttcgaaatggtttccaacctctacttctgccatctttagagacctaa

SEQ ID NO: 119 - DNA, 1434 bp, Arabidopsis thaliana
atgtacatggcaatcatgattatcctcttccttagctccattcttctttctctcctattgctccttagaaaacatttgtcacacttctcctatcccaaccttcctcccggaaataccggccttcccttaatcggagagagtttctccttcctctctgctggccgtcaaggccatccagagaagttcatcactgaccgagttcgtcgtttctcctcctcctcctcatgtgtcttcaagacccacctctttgggtctcccaccgcggtggtgactggtgcatctgggaacaagtttctattcactaacgagaacaagcttgtggtctcgtggtggccagattccgttaataagatcttcccttcttcaatgcagacgagctccaaagaagaagccaggaagctgaggatgcttctttcgcagttcatgaagcccgaggctttgaggaggtatgttggtgttatggatgagattgctcaaagacattttgagacggaatgggccaatcaagatcaagtcattgtcttccctcttaccaaaaagttcacgttttcaatagcatgccgttcgttcctgagcatggaagatcccgcaagagtaaggcaactagaagagcaattcaatacggtagcggtagggatcttctcaatcccaatagacttgccaggaacacggtttaaccgagccatcaaggcgtcgaggttactcagaaaagaggtttccgctatcgtaaggcagaggaaagaagagctcaaagccgggaaagcattagaggagcacgacatattatctcacatgttgatgaatataggagagaccaaagacgaggatttggctgataaaattattggattgttaatcggaggacatgacacagctagtatcgtatgcactttcgttgtcaattatcttgctgaattccctcatgtctaccaacgtgtgctacaagagcaaaaggagatactaaaggagaaaaaagaaaaggaaggattaaggtgggaggacattgagaaaatgagatattcatggaatgttgcatgtgaagtgatgagaattgttcctcctctttctggcacttttcgtgaggccattgatcacttctcttttaagggtttttacattcccaaaggatggaagttatattggagtgccaccgcgacacatatgaatccagactacttcccagaaccagagagatttgagccaaaccgtttcgaaggaagtggtccgaagccttatacctatgttccatttggaggaggaccaagaatgtgtccagggaaagagtatgctcgtctagagattcttatattcatgcacaatcttgttaatagatttaagtgggaaaaagtgtttccaaatgaaaataaaatagttgttgatcccttaccaataccagacaaaggtctccctataagaatttttcctcaatcttga

SEQ ID NO: 120 - DNA, 870 bp, Arabidopsis thaliana
atgatgttaccagaagcatgcgtggcgactatcctctcatttacaactccggctgacacaatctcgtcggcggctgtctcatcagttttccgagtcgccggagactctgactttgtgtgggagaagtttttaccgaccgattactgccacgtcatctctagatcgactgatcctcaccgaattttctcttctaaaaaggagctttatcgatgtctctgtgaatcaattctcatcgataatggcagaaagattttcaagatcgagaagctttcagggaaaatatcgtatattttgtcgtcaagagatctttccataacttggagcgatcaaagacattactggtcttggagcccacgatcagattcaaggttttccgaaggagtccaacttataatgacagattggttagaaatcatcggaaaaatccaaaccggagctttatcgccgaacacaaactacggagcttatctgattatgaaagtaacgtcacgtgcctatggactagacctagttccggcagagacatcgataaaagtgggaaatggtgaaaagaaaataaagtcaacttatctaagttgcttggataacaagaaacaacaaatggaacgtgtgttttacggacaaagagaacagaggatggcgacgcatgaggttgtccgaagtcatcggagggagccagaggtgagagacgatgggtggatggagatagagctgggagagttcgagacaggatcaggagaaggtgatgacgacaaggaggttgttatgagtctgactgaagttaaaggttatcaattgaagggtggaattgccattgatgggattgaagtaaggcctaaacccctaaaagtgagggccgggaccaactaa

SEQ ID NO: 121 - DNA, 888 bp, Arabidopsis thaliana
atggtagagataggaggacgatttatcagaacagcggcggcttttgatgtggcggcggcgcgtgcacgccctccgtgcgctagcagcagcggaagcgatcactctccggatgacacagaagatctttgggatctggtcgaatcttttatcgacagagaagtggaaactttacctgaggatgcttttcaggaagaagaagatgataaatcggatgaggattacgaagatgtgaaggagaggttacgggagattcttgaaaaccacggaggcgaagagcggcagagaataatggatgaggcggtaaatgctagtcgggtcttcgccggggagaaacgtcactttatggcttatctacgtaacaaaggttttgatgcaggtctctgcaagtctcgatgggagaaatttggtaagaacacggctgggaagtacgagtatgtagacgttaaggcaggagataagaaccgttacatcgtcgagacaaatcttgccggagagttcgagattgcacggccaacgacaagatacctctccgtcttagctcaagtgccacgtgtctttgtgggaacacctgaggagctgaaacagcttgtgaggatcatgtgctttgagatcaggcggtcgatgaagcgagcggatattttcgtgccgccgtggagaaggaatggttatatgcaagccaagtggttcggtcactataaacgaacctcaaacgaagtggtgagtagggttaagagctgcggctgtggaccgcgtgtagggtttgaagaatcggttaaaatgacgacctttaatggttttaaagatggggagatgaggaggagtggtctaaaggttggccagctaacggtggctttcaacggcagtgaagtggggttgcaaatattttag

SEQ ID NO: 122 - DNA, 591 bp, Arabidopsis thaliana
atgtcatcacttctctatatcttcctcctcttggccgtcttcatcagccaccgtggagtcaccaccgaagcagccgtcgaaccagttaaggacatcaatggaaaatctctcctcacaggcgtcaactactacatcttgcctgtaattcgcggccgtggaggcggactaaccatgtcaaacttaaagaccgaaacctgtcccacaagtgtgatccaagaccaatttgaagtctctcaaggcctaccggttaaattctcaccatatgacaaatcaagaaccatccctgtctcaactgatgtaaacatcaaattctctccaacttcgatctgggaattagccaatttcgacgagacgacgaaacaatggttcatttcaacttgtggcgttgaagggaatcccggtcagaaaacggttgataactggttcaagatcgacaaatttgaaaaagattacaagatcaggttttgtcctactgtctgcaatttctgcaaagtcatctgtagagacgttggagtgtttgtgcaagatggaaagagaagacttgctttaagtgatgttccactaaaggttatgttcaaaagagcatactag

SEQ ID NO: 123 - DNA, 978 bp, Arabidopsis thaliana
atggaagaaagtaaaaggaatttattagatgaagaagcgaaagcttctttagacatatggagatatgtttttgggtttgcagatattgcagctgcaaagtgtgccattgatctcaaaataccagaagccattgaaaaccatccttcgtcacagcccgtgacactatccgaactctcctctgccgtctctgcttctccttcacatctccgccgtataatgcggtttcttgtgcaccaaggactcttcaaagaagtccccacaaaagatggtttagccactggctacactaacacgccactctctcgccgtatgatgatcacaaaactgcatggtaaggacttgtgggcgttcgcacaggataatctgtgccacagccagctgatcaacgaggccatggcttgtgatgcaaggcgcgtggtgccacgtgtagctggagcttgtcaaggcttgtttgacggcgtggctacggtggttgacgtaggaggaggtaccggagagacgatgggaatacttgtaaaggagtttccttggatcaaaggatttaactttgaccttcctcatgttattgaagttgctcaagtcttggacggtgttgagaatgttgagggcgatatgtttgattctattccggcaagcgacgctgttatcatcaagtgggtgttacacgattggggagacaaagattgcataaagatattgaagaattgcaaagaagctgttctaccaaatatcggcaaagtgttgatagtggagtgtgttatcggagagaagaaaaacacgatgatagcggaagaaagagatgacaagttagagcacgtgagattgcagcttgacatggtgatgatggttcacacaagcacaggcaaagaacgaactttgaaagaatgggactttgttcttacagaagctggctttgctcgatatgaggttagagactttgatgatgttcagtctcttatcatcgcatatcgatcttaa

SEQ ID NO: 124 - DNA, 1179 bp, Arabidopsis thaliana
atggtgtctttaggttactgcttgaaggagaagaagacatgcgtgagatgggtagagatatacttcgatgactgtctctgtaacttaaacgacgacgtttcattcgcacttggaatcgctagcctcctctgttggggagtcgcagagattcctcaggtcatcactaacttccgtacaaagtcaagtaacggtgtctctctctccttcctcctcgcttgggtcgccggtgatatcttcaatctcgtcggttgtcttcttgaaccagctactttgccgactcagttctacacagccttgctttacacagtgagcactgtagtattggtgatccagactatttactacgattacatctacaaactttgtagacatagacgtaccaagatttgtcaaaaggatgaggaagatgaagagaagagaccattgaaaccaccaaagacgatgggatctgctatttccatcccaggaggatcttacaaagattcttctcggagagagttctattacacgtcggcgagatcgttggccggaagtggcacacctcccttaagaacatcgtattttcgagtggctaagagtggcccttcggctctggcaatcgacaatgatggttcgtcatcggacgaagatgagacaatgtcgacgtgtcctgtcataacggctaaaaccattacaaaaccaaggccaatacctagacaggcaggttttggaacgtttttggctgcatcggctagtcttccgcttcaggcaaagagcttagcggaaaaatatgcacatgcttcaagcagacggcttctaaacgaaagaatagtagagcatagcgcgttgggacaatggttgggatggctaatggccgccatttacatgggcggtcgcattcctcagatttggctcaacatcaaaagaggaagcgtcgagggtttgaatccactgatgttcatcttcgcgctagtagccaatgcaacatatgttggtagtattcttgtccgaacaactgaatgggacaacatcaaaccaaaccttccttggttgcttgatgctattgtctgcgtcgtactagatctatttataatactgcagtatatctactacaagtattgcaggataaagagcttggaaagcagagaagaagacgcctatggagactatgtggaagcaagcaaaacttttgtttcgtga

SEQ ID NO: 125 - DNA, 576 bp, Arabidopsis thaliana
atggcgactttggattctccgttagaggttttggctttcgactacgttaacttcgtctttaacaatctttggacatggatcgccgtcgtgacggccgccgttagtttctggcggatccgagccactaccactaccaccaccagcggaggtggtagagacaatggcttaatagatgaatcttttcttgagccaccaaaaccacaagcgacaaaggctgctctccttatggagacgaaacctcctagagtcaaggtaacggagactgaggattggagtttgttgttgtgtaaggacggagtaacgaaggggaagctaaccgtgtactacgaagaagagattgacggagagagagaagaagatgacggagagacaacggccgttaagtatggaggaggtgagagtggagaatggtgggagagatgggagagagtggtgaagatgagaaatggagatgaaggttggtaccgttacgtggatttaacggtgattaacggaaatgttgtgaggttgtgggatgctaaccgtgtacgtaacggtggttgggttagtgtgcaacgtaaggagtgttatggttga

SEQ ID NO: 126 - DNA, 276 bp, Arabidopsis thaliana
atgggtgatcataatagctcgcaagcttcttacatccatttggtgcatcatttgatagaagaatgtatagtattcaacatgggcaaagaagagtgtatggatgctctgttcaagcatgctaatattaagcctatcatcacttccacagtgtggaaagagctagcgaaagagaacaaagagttcttcgaggcatacgagagaagacgagaagaaataccgaccgagaaagagacagctcgaagaatccgtgatttgctttcacgaactacaatctaa

SEQ ID NO: 127 - DNA, 612 bp, Arabidopsis thaliana
atgggtgaatcttttagattattcaatcatcatcacttcctcacaacttttctcataatcatagccatgctcaaattggttcatacaacaacaacaacaactacaacaacaacaacaaacaccgagttcgtaaaatcatcatgcactttcacaacgtacccaagactctgtttctcttcactctcaactcatgctagtctcatccaaacaagccccaagctcatggctcatgcggctctcaacatcacattagcctcggctaaagtaacttcagcaatgatggtgcgtctctcgaatagtcggctcaagcctaaagaagtctcggccatgagagactgcgtcgaggagttaggtgacacgttggaggagcttaggaaatcgattggtgagatgtgtcagctaagtggctcgaactatgaagtttacataagcgatatacagacttgggtcagtgcggctttgacagatgtgaacacatgtactgacggatttgaaggagaagatatggacgggaaggttaaggttttggttagagggaggattttggttattgctcatttaacaagtaatgctttagctttgattaatcactttgcttctattcatggctaa

SEQ ID NO: 128 - DNA, 465 bp, Arabidopsis thaliana
atgaagctaagcgagtcaagaggcgaaacagagaagcacaggcgacaacaacatttcgagcacgagcttaagaacatgatctcttccttaacccacatgggaggagataaggcaggacctagccaatacgatgaagaggaagatggtatcagagtcatcacactttctggatccaaccttggagccaccatgaagaccgagcttgacaacaatcatggagacagagaccaaaatggcgaccacgagcttgatttcctaagcacttatgttaatagcaacttccaagctgtgaacaactcgattatgataggggccaagtacgagactcatgatcctggcgttcatcttgacatttcgggcgatgtggagaaaccttcggtgaagatacctgcgaggagttcaaggggaaagaagggtaagactcctgccagaagtgaccgtcgagaatctgaacatactaattga

SEQ ID NO: 129 - DNA, 1065 bp, Arabidopsis thaliana
atgagcggtggagatggagataatagttactccaccaattctcttcttcagaaaaaagtattatcaaaggccaaaccggttttggttaagaacacaaaaggaatgatgataaacttaaattttcctaattacatcaaagtagctgatttgggatgtgctactggagaaaacacgttcttgacgatggctgagatcgtgaacacgatcaatgtgttatgtcaacaatgtaaccaaaagccaccagaaattgattgctgtctgaatgatcttccggataacgatttcaacacgacattcaagttcgtacctttcttcaataaaagggtcaaaagcaaaagattgtgcttcgtgtctggagtccccggttcattctactcgaggctctttcctcgcaaaagtctccattttgtacattcatcttatagcctccattggctctctaaggttcccaaaggactggagaagaattcctcgtctgtgtacataacgacttcaagtcctccaaatgcatacaaggcttatttaaatcaattccaaagtgactttaagtcatttctagaaatgcgttctgaggagatggtttctaatggacgcatggttctcactttcatcggtagaaagactctcgatgatccattgcatagagattgttgtcacttttggacactattatctacatctctacgcgacctagtctatgagggtcttgtgagtgcgtcaaaggtggactctttcaacataccgttttatgatccgagcaaagaagaagtgatggagatgattcgaaacgaaggctcattcgagatcaatgacttggagattcatggatttgagcttggcctaagcaaccatgacgaggactacatgttacattcacaaatatctaaagcagggcagagggaagccaactgtataagagcggtcagcgaatcaatgcttgtagctgacttcggagtagacattatggacacattgtttaagaaatttgcataccatgtgtcacaacatgctagctgcacgaacaaaacgactgttactctagtcgtttctttgatacgaaagtaa

SEQ ID NO: 130 - DNA, 393 bp, Arabidopsis thaliana
atgataaaaatggcagtaaaatttgtggtagtgatgatagtgtttgcacaaatcttagctccaatcgctgaagctgctcaaggaaaagctgtctattacgaccctccctacactaggtctgcgtgttacggaacacaacgtgagacgctggtagtcggagtcaagaacaatttgtggcaaaatggtcgagcttgtggtcggaggtacagggttcgatgcattggtgctacatacaactttgacagagcatgcaccgggcgtaccgtagacgtgaaggtagttgatttctgccgggagccttgcaacggtgaccttaatctctctcgtgacgcttttcgggttatcgctaatactgatgccggtaacattcgtgtcgtatacacaccgatatga

SEQ ID NO: 131 - DNA, 2469 bp, Arabidopsis thaliana
atggcccaacgctttcaattgaactcacaaaccctcccaacggccgaccctctcaaaagggtctcccttattccaagatccgccgagcagaggctggctgataacgcaggcgagaggcgtcctttagcaccgagatctcacgaagacaacccctttgggggtcatactgatgatcaccatgttgctgctcctgcggaccataataaggtgatggatcataatagcgagaatctcggttccattgtccctaagactgcacattaccctcatccatctgaggaaatccttgatgctaatatccgacattcgatggttccgaaatcattgggtcccaattcgctcggtggaagatttggtccgggaaagaaacaagctttccatagaaatggcagacccatgttttcactttctgatgaccgagtcatggctgatagagtcttgaagactcacagtccagacatgatcttctttgatgtcacatcacttctctccgttgttaatgacatcttcaagtctcatgtcccatccattgactcctctgctcctaagccatcactcgtcttcaaggactacgctgatcatacctcctttgaaacttttgcggatctcattgatcaaatctcttgcgagatcgactgcaagtgtctccatggcggtgagtctcacggtatgatgacatcagggcttcatttggatagtcgcaacacgacgacgttctctgttctgtctttggtctccaaataccgttgggatgctaagctagtccttgtcctatctgctttggccgtgaaatacggcgtttttctcctcctcgcggagacacacgcaacaaatcagctcacaaaatctctggctctcatcaaacagctccctagcatcttctcccggcagaacgctctacaccagcgtctcgacaagacccgaattctgatgcaagacatggttgatctcaccactaccatcatcgatatctatcaactcccgccaaaccacatcacagccgcgtttaccgaccatatccccactgcggtttactggattgttcgctgtgttttgatatgtgtttctcacatcagtggcgccagtggtttcaagcaggatcaaatcatgtcgtttatggaagtttcggagatacatgagaatagcgaaaggcttaggaagatcaatgcttacttgttagaacaattcaagaagagtaaaatgaccatcgaggaaggtataatcgaagaagagtatcaagaactcatccagacgttcactactatcattcacgtcgacgttgttcctcctctacttcgtcttctcagacccattgattttctttaccacggagctggtgtttcaaagagacgcgtcgggatcaacgtgctcacccaaaagcacgttctgcttctgatatcagacctagaaaacatcgaaaaagagctctacatcctggaatcgctctacacagaagcatggcagcagtcattcgagattctttgggttccagttcaagatttctggacagaagctgacgatgccaagttcgaggcccttcacatgaacatgaggtggtacgttcttggagagcctcggaaattaagacgagccgcgataaggtttgtgagggaatggtggggtttcaagaacaggcctatactcgttgcacttgatcccaaaggtcaagttatgtcaaccaacgcctttcctatggtctggatctggcaaccctttgctcacccttttaccaccgcaagggaacgtgatctatggagcgaacaggagtggaatcttgagttcttgattgatggcactgatcctcattccttaaaccagcttgttgatggaaaatacatatgtctctacggaggagaagatatgcaatggatcaaaaacttcacgagtctctggcgtaatgtagcgaaggccgcaaacattcaacttgagatggtttatgtcgggaaaagaaaccctaagaatggaatccagccgataatcaacacaatccgggaggaaaatctcagccatactttgccggacttgttccagatctggtttttctggaccagggtcgagagcatgtgggaatcgaagcagaggatgctgaaagcccacggaatcaaggggagagaagggtttaaagaagaggaaaaggaccttgttctgcaagaagtggttgctatgttaggttatggaggagaaggagatggatggggactggtgagtaaagcatcggacatgatggttcgagccaaagggaacttgttttctaggggtttggctgaatttaacgaatgggaagtcaacatccccacaaagggttttcttacagcgctcaatgatcatctcttaatgcgtctcccaccacatcactgcacaaggttcatgcttcctgagactgctggaattatacctaatgaggttgagtgcaccgagtgccgtaggactatggaaaagtattacttgtaccaatgctgccttgagtaa

SEQ ID NO: 132 - DNA, 612 bp, Arabidopsis thaliana
atggcacgaaacctaaagagcatgatgctttgtgggtttggtctcttgtgttttcttatgatcgttgaccgagcctacgctagagagtttacggtcggtggtgcaacaggttggaccgtcccttctggttctcaagtgtacagtcaatgggcagaacagagcagattccaaattggtgactctctgttgttcgtctaccaatcaaaccaagattcagtgctccaagtcacaagagacgcttacgacagctgcaacacggactcaccaaccgctaaattcgccgatggcaaaacttctgtcacgctgaaccactctgggccatactatttcattagtggaaacaaagacaactgcaagaaaaacgagaagcttgtggtcatcgtcatggctgatagaagcggcaacaaaaacaccgcatcatcaccgccgtccccagccccagctccctcaggagaatccgctccttctccacctgtctcgggaacctttgagatgaccccagcaccgacgcctactacttctgaagacactccaaacagcgcagcttcttccttatcatttgtcgctgctcttcttggggctgctctagcttccactctattcctacactaa

SEQ ID NO: 133 - DNA, 1086 bp, Arabidopsis thaliana
atgaatcaaacactcgctgcccaattcttaacccgagaccaagtcaccaactttgttgtacacgaaggtaacggtgttaaaggcttgtctgagaccggaatcaaagttcttcctgaccaatacattcagccattcgaagagagactgatcaacttccacgtaaaagaggattcagacgaatccatacccgtgatcgacatatcaaatttagacgagaagagtgtctccaaggccgtatgtgatgctgcagaagaatggggtttctttcaggtgatcaaccatggcgtgtcaatggaagttcttgagaatatgaaaacagctactcacagattcttcggtttaccggtagaagagaaaagaaagttctcaagagagaagtctttgtcaacgaatgtgagattcgggacgagttttagtcctcatgctgagaaagctctcgagtggaaagattatctgagcctcttctttgtctctgaagctgaagcatcacaactctggcctgactcttgcaggagtgaaacgctagaatacatgaacgagacaaaacctctagtgaagaaactcttacggtttctaggcgagaatctgaacgtgaaagagctagacaagaccaaagagtcattcttcatgggttcaacacgtatcaacctcaactattaccctatttgtcccaatccagaactcacggttggagtcggacgtcactctgatgtttcctcactcacaatcctcttacaagacgagatcggtggtctccacgttcgttctctcaccacggggagatgggttcacgtgcctccaatctccggatctttagtcattaacattggagacgctatgcaaatcatgagtaatggtcgttacaagagtgttgagcatcgtgtcttagctaacggttcttataacagaatctctgttcctattttcgtgagcccgaaaccagagtctgtgatcggtcctcttcttgaagtgatcgaaaatggagagaaaccggtttataaagatattctttataccgattacgtgaaacatttcttcagaaaagctcatgatgggaagaaaaccatcgattttgccaacatttga

SEQ ID NO: 134 - DNA, 864 bp, Arabidopsis thaliana
atgtccacatacgtgtcctctgtcttctctctcgccaccatgaaacaaaaccctctgaagcgcaaacgcaacgatgagatcactgaagagaaagtcgtactactcatggctatgcacaaagaagacgacgagcaccaacataccaaaccgtctccaccatcttgggagattctctgccttgttggtccttacatggaccctgagtcactagccgtagcctcttgcgtctccaccacgtggtcgaagtgcttctcctcggaagatctatggaagtctctaccagccacacgacattctatattcgctaaagccatcaccaaggagggagctaagcccgcctggttatcgtacaagcgtctaatctctgaagcagaatctgcagcaaaacgccgccgcaacaaccaacccgcggagccaaagatctctctctccgatcttgttttcatcgtccacgtgtcagctggatcaaaagaagcagtggttgtgaaacaggggaaggatcttgtgtttggctcgaacgagcggttccaaatcgaagctgatgtccgcgactcgggattcaccgccgatatgaaagacgtgagcatgtcgtggaacgtcgtgttaaggaattacgaaagaatgtttctaatgtcggagactgttataaagtcattagattctatgattggatggttcaccgatgaacttccggggacaaagaaccgttactgtgacggtagcaacctggtgggagaagtcaagccaagttttaatgaagatgttcttgataaagtcgtgttcgctattgcagattcacgcaactggaagtctctgttcgttgacgatgtcttgagatatctccaatgttttcttgtcgactaa

SEQ ID NO: 135 - DNA, 687 bp, Arabidopsis thaliana
atggatgaagaagcagcgattgatcgtttaccattagaccttcttgcatatatattttcgttggctacttctttcaccgttttggcccaggcaagtggtgtttgcaagaaatggagaaaagctgtaaatcaatcgatggcgagaagagaaactctgagctttgctggttggaaaatggacgatgattccacttctcgtctcgttcatcttgctttcaacctcaaagaactcgacatatctcgaagcagatggggttgtcatataactgataatggtctttaccaaatagcttctgcaagatgtgtatccaatttaaactctgtctctttatggggcatgaccgccattactgattctggtgttgttcaactgatttcaagaacttcctcactgcaacacctaaacataggaggaacatttataaccgatgagtctcttttcgcaattgcagaacgctgccatcagcttaagacaatcggaatgtggtgttgccgtcatgtgacagagagaggccttcttgttcttgtaaacaaatgcagaaaactcgaatccatcaacttatggggaactagagttcctgtagattgcttcattgctttacttaccatcagtcctgctcttcagatcaaacccatggaattgcttctcaatgctcagaatccaccaccgttgctgcatgctgtctag

SEQ ID NO: 136 - DNA, 2223 bp, Arabidopsis thaliana
atggagtcgctgatcaagtcccagcacgctcagcaactggcgggtcacaagaatacgaccggtaaaactccgtccatggagatgataccggcgacgggacttgcgatgtcatcggacgaaagcatgatgctgaagctgattcaacaaactcactccccagatgctcgcgaagtccaagtgcgtggccttctctctctcgttgaagatattctcgatcgtgccactcttgactctgaagacaccaacgcctccatgcttccgttgcccactgaggataaactgatgcagtcaagcatgatgagcgttcttgatagtgtctcctatgctatcgatcgtgttgcctgcgagatagcctataagtctctgacgggatctgattcacacgaaatcacaatgtccgtgttcgaacacctctcgagcttccagtgggacggcaagctcgtgctgactctagcagcgttcgcgttgaactatggagagttttggcttctggtccaattctactcaaagaaccagcttgctaagtccctagctatgctcaagctcgtccctgtgcagaacagagtgaccctagagtctgtgtcccaagggctcaacgatctcatccgagagatgaagagcgtcacggcatgtgtagtggaactcagcgagttacctgatcggtacattacaccagacgttcctcagctgtcgagaatcctctctacaatcccaattgctgtctattggaccataagaagcgtcatcgcttgcatttctcagatcaacatgatcactgctatgggacatgagatgatgaacacgcaaatggatttatgggaaacatcgatgttagctaacaagcttaagaacatacatgaccatctcgctgagaccttgaggctttgttaccggcatatagagaagcagaggagctcagagtccttaaaggtgttgcattctctattcgacaccactcacattgataacatgaagattctcacggccttggttcatcccaaaccccacatcactccattgcaagatggtttgaccaagagaaaggttcacttggatgtgttgaggaggaagacagtgttgctgctcatctctgatctcaacatactacaagatgagctatcgattttcgagcaaatctacacagagtcaaggaggaacttggttggggtcgatggtaagagtcatatgccttacgaggttgtgtgggttccagtagtggatcctattgaagattttgaaagatctccgattttacagaagaaatttgaggatctccgtgaccctatgccatggtattcagtggatagcccgaagctgatagagagacatgtggtggagtttatgagagggagatggcattttatgaacaagccgatacttgtggtgattgatccacaaggcaacgaggctagcctcaatgcgcttcatatgatctggatttggggcactgaagctttccctttcactagatctcgtgaggaagagctctggaggagagagaccttttcccttaacctcatcgtcgacggcatcgactctgtcattttcaactggataaaaccggataattacattttcctgtacggaggagatgacttggactggataaggagattcacaatggcggccaaagcaacggccaaagattccaacgtgaaccttgagatggcttacgtcggaaaacgaaaccatagccacagggaacagatcaggcgtatcagtgaagtaatcaggtctgaaaacctgagccatagctgggccgaacctgccttgatgtggttcttctggactaggctcgagagcatgttgtactccaagattcaactcggtaaagccgatgatcacgacgatgtgatgcaaggaatcaaaaagatactaagctacgacaagcttggaggatgggcactactgagcaaaggacctgagatagtgatgatcgctcacggtgccatagagaggactatgagtgtttacgaccggacctggaaaacccacgtcccgaccaaaggctacaccaaagcaatgtccgaccaccaccacgatgaggtcctccgtgaaaccggaaaaccttgcggccactttgatttccacatcactgctcggagcggtcggattccggagaagatgaattgcttcgagtgtcagcgtccgatggagaagtacatgagcttctcttgttgtcacgatgaaaagctccacgaagacgagaactacaacttctaa

SEQ ID NO: 137 - DNA, 492 bp, Arabidopsis thaliana
atgacaaagataggaggtattcttgtttgtctagtcattgtgggcttagatgtagctgctgcaatcctcggaatccaagctgaagtcgcccaaaatcaggtgaagcacatgaggctttggttatttgagtgcagagagccgagccaggacgcgttcaggctcggtctaggtgcagccgcgatattggtaatggctcatgtcctacttaacttggtcggaggctgtctttgtatttgctctcaagacgagtttcaaagatcttcttccactagacaaatctccatggcttgtcttgtcctcacttggatcgtattcgctgttggatttgggagtatagtgattgggacgatgtcgaacagtaagtcaagatcctcttgtggattcacacatcaccattttctctccattggagggattttgtgttttcttcatgccctcttctgtgttgcttattacgtttctgccactgcggccaaagatgaagctaagtga

SEQ ID NO: 138 - DNA, 609 bp, Arabidopsis thaliana
atggcttcttttcacagaaagttatgtttgttccaaaacattctcgtatcgtgtctgaatttcactctcctcctcctctccctctgttctttcgtaccaatcattcttcttagaaaccctccaacttcactcggtttagccttcctcgcagtctcactcgtctctctgatctcctctttcggtagtgcctcttcgcaccaatctcgatcatgtttcatcgcgcggataacgcttcatgtttcctcactgacgggtcagtttattgcagttttaatgttgtttagtagagagaaacagagtctttctttgctgatatcgactcgagaccctagagaggctaaagctttggttagagtagaatgtggtgttttcgtggcgatgattccgttacagataatggttctagtgctggcttgtttgttacattgttattgggttagagagttcgaagggttagatgttgagagtgaagattcttttagaagaaaatgtaaccgaagagtctcgaccgctgaagatgggactagttcggatttaaagaaaatggagttggacgagaagatgaatgtgaaacatgttcagtgggttaaaacagatttcgaaggttaa

SEQ ID NO: 139 - DNA, 1410 bp, Arabidopsis thaliana
atggtgaacgaagaaatggagtcatcacttaaagtcatcgacgtggcacgagtcacaccatcaaactccgactcgtccgagtcactcactctcccactcaccttcttcgacctcctctggtacaaacttcacgccgtcgaacgagtcatcttctacaaactcaccgacgcaagtcgtcctttctttgactcagtcatcgtcccaaacctcaaaacatctctctcctcatccctctctcactacctcccactcgccggaaaactcgtgtgggaaccacttgatcccaaaccgaaaatcgtctacaccccaaacgacgccgtttcattcaccgtcgccgagtcaaacgcagacttctcacgtttaaccggcaaagaaccgttccccaccaccgagttatacccgttagtccccgagttacatgtctccgacgactcagcttccgccgtgtcgtttcaagtcacgttatttccaaaccaagggttttgcatcagcgttaatgcacatcatgccgttttagatggaaaaacgacaaccaactttctcaaatcttgggcacgcacatgtaaaaaccaagattcttttctaccgcaggatctaatcccagtttacgatcgtacggtcataaaagatccaatggatttagatacaaagatcttaaacgcttggcacagagtagccaaagtgttcaccggtggtaaagaaccagaaaaccccaagagtttaaagcttttatggtcgccggagattggtcctgacgttttccgatacactctcaatctcactagagaagatatccaaaagcttcgagagagactcaagaaagagtcttcttcttcctctgtttcctcatcacccaaagagcttcgtttatcaacgtttgtgattgtttactcttatgctttaacgtgtttaatcaaagctcgaggcggtgatccgagtagaccagtcgggtacggattcgctgtggattgtcgaagccttatggttccaccggttccatcgagttattttggtaattgtgtatctgcttgttttaaaatgtcgttaacggcagagacttttatgagtgaagaagggtttttagctgctgcgagaatggttagtgattctgttgaggcattggatgagaatgttgcattgaagattccagagattttggaagggtttacgactctttcaccaggaacacaggttttgtctgttgccgggtcgacccggttcggagtttacgggttggattttgggtggggtagaccggagaaagtggtggttgtgtcaattgaccaaggtgaagcgatttcttttgcggagagtagagatgggagtggtggtgtagagcttggcttctccctcaagaaacatgaaatggatgttcttgttgatttgcttcacaagggactagaaaattaa

SEQ ID NO: 140 - DNA, 825 bp, Arabidopsis thaliana
atgagctattctcgtcaaagcatgggttctggtagtagaagtacaaggggctatgagtttggaaggacttatgttgtgaggcctaaaggaaagcaccaagctactattgtttggttgcacggtcttggagacaatggctccagaattttggcgtgttctttgataacaacttctcactttggctctgtttctttctgcagctcgtctcagctattggaaagcctacctcttccaaacatcaaatggatttgtccaactgctccttcgcgtcctgtttcgcttctcggtggatttccttgcactgcctggtttgacgtgggagaaatttctgaggatcttcatgatgatatagaaggcttagatgcttcagctgcacatattgctaacctattatctgctgagccaacagatgtcaaagttgggataggaggtttcagtatgggtgcagcaatagctctctactccacgacgtgctacgctcttggacgttatggaaccggacatgcttatactataaacctacgagctactgtaggacttagcggttggcttcctggttggaggagcttaaggagcaaaatagaaagttcgaatgaggttgcaaggcgcgctgcatcgataccgatcttacttgcacatggaacttcggacgatgtagttccttatagatttggagaaaaatctgctcattcacttgccatggctggattccgacaaactatgttcaaaccatatgaagggcttggtcactatacggttcctaaagaaatggatgaggtggttcactggctcgtctcaaggcttggtctcgagggttcgcgttaa

SEQ ID NO: 141 - DNA, 486 bp, Arabidopsis thaliana
atgggtcaagctctcaataccgcaaaaggtaaaggagaggtagacgcgaaagacttggaagctatggctgaaaattgctaccgcaaacgcttagaagaaaaaaatgacgatcaagaatggtcctttggcgacttctaccgcattgtggctgaagcagtcgaggaaattaacagaagactcggtggcactcaacttaaggtgccaagtgttgagaaactacaacaagcttatgagatacacaatctcgggcaggggaagaagctatcgaaggacgagtttcagaagcttcttcaagaggttttaatcggagttgggttcaccggcgtcggaggagtaaaggaatttctacttttcatcttcggagttcctgcgatcgccgtcttcattaagaaccgtatagctccgacgtccgttcccaacgacttgtttatccccgccatcacttccgccaccgtcttcctcctcgccaagctcaataagatatga

SEQ ID NO: 142 - DNA, 477 bp, Arabidopsis thaliana
atgggtttcattattgcgattgcaaaacgttttgatgctctagttgggcctggagtcatgcttctctatcctctgtatgcatcatttcgagcaatagagagtccaacaatgttagatgatcaacaatggcttacatattggatcatttactctttaataacgatattcgagctatccgtttggagagtccttgcctggctaccattttggccatacttgaagcttttgttctgtatgtggttggtgctaccaatgttcagtggtgcagcttacatttactccaattttgttagacaatacgtcaaaattgggatgaatgttggaggaggaacgaattatacagacgaacaaagaagagttttacagatgatgagtcttgatgctagaaaatcggttcaagactacgttgaccggtttggatgggattctgttgagaaagcaatcaaagcggctgaaaaagaaactagaaagcattga

SEQ ID NO: 143 - DNA, 708 bp, Arabidopsis thaliana
atggctgaagatgaaatagtagtcgaagaagagcaatcacagccacaggagattactccagttccaccatcttcttcgtcttcgccttcgttagtggtggaagacgacgatgagatgaagctcaagcacttggaattcattcaagtcgcggcggtttacttcgccgcctgtttctcgaccctctacgagttggctaaagacaacgctggtccactcaaactcggcgtcgagaacattgaagattgcgttcgaaccgtgcttgctccattatacgaaaaattccacgacgttcctttcaagcttctccttttcgtcgatcgtaaggtggacgatgtgttcttcgatgttgagacatatgttccgtcattggtgaagcaagcttctagccaagcgctcacggtggccacggaggtgcagcgcaccggcgttgtggacactaccaagagcattgcaagaagcgtccgggacaagtacgagccagcggcagagtattacgcagcgacgctgtggcgtttactgaatcaactgccgttgttccctgaagttgcgcatttagtgatccccacggcgttttactggtcagagaagtacaacgatgcggttcgttacgttggcgacagagactactttggggcagagtatctacccatgattcctattgagaagatctctgatattttggaacaagatcagtgtcgagctgattga

SEQ ID NO: 144 - DNA, 930 bp, Arabidopsis thaliana
atggccagttccggtgattatgatgaaattataaagtctatatctgatgccccaccaacacattacatggtcaagatagagtctttctcactccttacaaagcatgctattgagagatatgaaactgagagctttgaagctggtggctacaaatggaaactggttctgtacccaaatggaaacaagagcaagaatacgaaagaccatgtttctgtttacttgtctcttgcggactctagttcattaagtccagggtgggaggtttatgcagttttccgtctgtatttactggatcaaaacaaagataactatttgattctacaaggaaacgagagacggtttcattcggtgaagcgcgaatggggatttgataaattcatcccaaccggtaccttctctgatgcgtcaaacggttaccttatggaagacacatgtatgtttggagctgatgtgtttgtttctaaggagagaagaagtgggagaggagaatgtttatcaatgattaaagatgctactagctctaaacacgtctggaaaattgagaatttctccaagttagacaaagagagctatgactctaatgctttcttcgctggagatagaaaatggaagatagagttttatcctacgggaacaaagcaaggaacaggaacccatctttctatctatctgacccttgttgatcctgaaaccatttcagatggtacaaagatatttgtagagtttacaattcgaatatttgatcagttacaaggcagacacattgccgggaaggttactaaatggtttagtcgatcaagctcggagcatggatgggtgaaatatgtatccatggtttatttcacgcagccaaacagtggtctgttgctcaaagatgtatgtcttgttgaagctgatgtatgcgttcatggaatcaccagtgcaatctaa

SEQ ID NO: 145 - DNA, 1149 bp, Arabidopsis thaliana
atgtcttcagatcaactaagcaaattccttgatagaaacaaaatggaagacaataaaagaaaagtattagatgaagaagcgaaagcttctctagacatatggaagtatgtctttgggtttgcagatatagcagctgcaaagtgtgccattgatcttaaaataccagaagccattgaaaaccatccttcttcacagcccgtaacactagccgaactctcctccgccgtctccgcctctccctcgcatctccgccgtataatgaggtttcttgtacaccaaggaatctttaaagaaatccccacaaaagatggtttagctacaggctacgttaatacgccactctctcgccgtttgatgatcacaagacgtgatggaaaatcgctggctccttttgttctcttcgaaacaactcccgagatgctcgctccatggttgagacttagctcagtcgtttcttcgccggtcaacggttcaactccaccaccgtttgatgcagtgcacggtaaggacgtgtggtcgttcgcgcaggataatcccttcctcagcgatatgatcaatgaggccatggcttgtgatgcaaggcgcgtggtgccacgtgtagccggagcttgtcacggcttgtttgatggcgtgactacgatggttgacgtaggaggtggtacgggagagacgatggggatgcttgtgaaggagtttccttggatcaaaggatttaactttgatcttcctcatgtcattgaagttgctgaagtcttggacggtgttgagaatgttgagggcgatatgtttgattctattccggcttgcgacgccattttcatcaagtgggtgttacacgattggggagacaaagattgcataaagatattgaagaattgcaaagaagcggtccctccaaatatcggaaaagtgttgatagtggaatcggtgatcggagagaataaaaagacgatgatagtggacgaacgagatgaaaagttagagcacgtgagattgatgcttgatatggtgatgatggctcacacaagcacaggcaaagaacggactttgaaagaatgggactttgttcttaaagaagctggctttgctcgatatgaggttagggacattgatgatgttcagagtcttataatcgcgtatcggtcttaa

SEQ ID NO: 146 - DNA, 534 bp, Arabidopsis thaliana
atggcttcttcttctcttttggtcaccatcttcctctgcatctctgtcttcttcttttcgtccgtgaatgcaaatgaggttaccgtcggtggaaaatccggtgactggaagatccctccttcctcttctttctcctttaacgaatgggctcaaaaggctcgcttcaaagtcggcgactttatcgtattcaagtacgaagccggtaaagactcggttttgcaagtgacacgagaagcatacgagaaatgcaacaccactagccctaaagccagctacaccgacgggaacacaaaggtgaagcttgaccaagctggtccggtctacttcgtcagtggaacagagggtcattgtcaaaagggtcagaagctacgcctagtcgtcatcactcctcgtaactctgctttctctccaggtccttcgccatctgagttcgacggtccagccgtagctcctactagtggtgccgctaagctcgccggcggatttagtgtcgtatttgggcttgttcttggattatgggccttcttcttttaa

SEQ ID NO: 147 - DNA, 906 bp, Arabidopsis thaliana
atgacgaagctcttcttcttcttcttctccttcctctacacaatcacaaccctaacatttccgccattaacaacctcagcagcaacatcatgccgaacattatgcggcaacatcccaataaactacccgttcggcatcgacggcggttgcggatctcctcaatacagaggaatgttcaattgctccaccgatctatatttcaccactccttccggcagctataaggtccaaagcatcgattacgagaagaaaacaatggtaatcttcgatcctgctatgtctacttgctcgattcttcagcctcaccacgatttcaaaatggcggatattcaaaacactcttattagaccttcgtacgacaccgttttcgcacttttcaactgttccaacgattctcctgttcataatcgttaccggaatctatgttttaatgccgccggccactcttgcgacgagctttatagctcctgtacttcctttcgaatcttcaacaccacttctccctatggtaacaacagtacggttcatacgacgccgtattgctgtttcactaactacgatacggtgcgggtgatgagtatgaacattttggattgctcacattacacgacggtgattgacaatggaaaaatgagaggagtggggcctttggattggtcctatggaatcgagctttcgtactcggtaacggagattggctgtgaccgttgccgaaagtcaggtggcacttgtggctttgacgccgagacggagatctttctttgccagtgttccggttccaacaacaaccctacgagagaatgtggtggaggtatgactgatcgaggaggctgcagttttacaaacataaattttataacgactctcttgactatgttcatgtcttttatttacactgttttgtga

SEQ ID NO: 148 - DNA, 1731 bp, Arabidopsis thaliana
atggaaggatccaagctacttccttgcgtccataagtctccggttcccacctcccaccaattatatataaattatgagattttgggtttaacaaaactcaaaaaacacaaatacacccaaaacaagatgagctcctctgactcttcttccgccgaatcccgtctagccacggctaagacggttctcaccaccgcggcttcggtggctgcgaccgcaatgctagctcgatctttagtccaagattatttgcctgacgaggtgcatcactacatttcctatggattccgttccatctttggttacttctcatcccaaatgacgataatcatcgaagaatttgaaggttttgctcacaatgaagtctttgaagctgcagaggcctatctagccaccaagatctctccttctaacaaaagaatcaaagtgagtaaacatgagaaagaaaacaactacaatgtcaccgtggagcgtgacgaagaagttgttgacacctacaatggcgtcaaattccagtggatcctccattgtcgtcatgtcgagtccaagcacttccacaacccacgggatctaaactccacactgagatctgaggtccgatcattcgaactcaacttccacaagaaattcaaagacgtagctcttgaatcttacttgccattcatggtgaaaagagccacgttgatgaagcaagagaagaaaacactcaagatcttcactctctccccagaaaacatgtatgggaactactctgacgcgtggacctctgttactcttgaccatccttctaccttcaaaactctagcaatggattcagatgtcaagacaagtgtgatggaagatctagacaaattcgtaaagcgaagagacttctataaaagggttggtaaagcttggaagagaggttacttgctgtacggtccaccaggcacagggaagtcaagcttgatcgcagccatggccaatcatctcaactttgatatatacgacctagagttgaccgcggttaacaacaattctgagctccggcgattattgattgccactgctaatcgttcgattcttatcgtagaagatatcgattgttcactagaattgaaagataggactagcgatgaacctcctcgggaatctgacgatatagaagatccacggtataaaaaagtgacactctctggactgttgaatttcatagatggtctatggtcaagctgcggtgacgaaaggatcataatcttcacaaccaattacaaagagaaactcgacgcggccttgctgagaccaggacgtatggatatgcacatccacatgtcgtattgcacaccaagtactttcaaagctcttgctttgaactatcttgagatcaaagagcaccgccttttcagcaagatcgaggaaggtattgaggcgacagaggtcactccagcagaagtagctgaacagcttatgagaaatgactctgtagacaaggttcttgagggtttgattgagttcttgaaagtcaagaagatcgaaaacgaacaagataaggccaaaacagagaagcaagagttggagaacaagaaaaagaccaaggagggaacagattccgtagtcaagaaagaggttgatgaacagctagtgaggaatgaccgtgttgataaggttcttgagggtttggtcgagttgttaaaagccaagaagatcgaggacgaccaagataaagccaaacatgaggaggttgaacaacattaa

SEQ ID NO: 149 - DNA, 1605 bp, Arabidopsis thaliana
atggacggtgtatcaccaaagtttgtgttgccggagacattcgacggcgtgaggatggagatcacaggccaactaggcatgatctgggagcttgtaaaagcaccagtgattgtccctcttcttcaattagctgtttacatctgtttgcttatgtctgtcatgcttttatgtgagagggtttacatgggaatcgtcatcgtcctcgtcaaactcttctggaaaaaaccagacaaacgttacaagttcgagcccattcacgatgatgaagagcttggtagctccaatttccccgtcgtcctcgtacaaatccccatgttcaacgaacgagaggtttataagctatcaataggagcggcgtgtggactttcctggccgtccgatcgtctcgtgattcaagtgttagatgactctacagatcctactgttaagcaaatggtggaagtggagtgtcaaagatgggcaagtaaaggaatcaatattaggtatcaaataagagagaatagagttggttacaaagccggtgctttaaaggaaggactcaaacgtagttatgtcaagcattgcgagtatgttgtcatcttcgacgccgattttcagcccgaacctgattttcttcgccgtagcattcctttcctcatgcacaatcccaacattgccttggttcaggctcgatggcggttcgtaaattctgatgagtgcttattgacgagaatgcaagaaatgtcattggattaccatttcactgttgagcaagaagtgggttcatcaacacatgcttttttcggcttcaacggaaccgccggaatatggagaatagcggcgataaatgaagctggtgggtggaaagatcggaccaccgtggaagatatggatctcgccgtccgagcaagtcttcgcggctggaaatttctctacctcggtgaccttcaggtgaaaagtgagcttccaagtacttttagagccttccgttttcagcaacatagatggtcttgtggacctgcaaatctctttaggaaaatggttatggagatcgtaagaaacaagaaagtgagattctggaagaaagtgtacgtgatatacagcttcttctttgtgaggaaaatcattgcacattgggtcacattttgtttctactgcgttgttcttcctctcacaattctcgtcccggaggttaaagttccgatttggggttcggtttatatcccatccatcatcactatcctcaattccgtcggtactccaaggtcaattcatctgctgttctattggattctattcgagaatgtgatgtcgctgcaccggacaaaggccactctcattggtctgtttgaggcaggaagggctaacgagtgggtagtgactgctaagcttggaagcggtcagagcgctaaaggaaacactaaagggatcaaaaggttcccaagaatcttcaaattgcctgatcgattgaatacattggagcttggatttgcggctttcttgttcgtgtgcggatgctatgactttgtgcacgggaagaacaattacttcatctacctgtttcttcagacaatgtctttcttcatcagtgggctgggctggatcgggacttatgtcccgagttag

SEQ ID NO: 150 - DNA, 552 bp, Arabidopsis thaliana
atgtctttttcttccctcaaattgccaatctttctcattctctcaagtcttctccatgcggctataggggaaaacattgtttgcgagaatctgccaacaaatatgtgctcgttctcaatatccgcttccgggaaaagatgtatattggagacggctaatgtcgccggagaattcacttgccgcacttccgcagtggacgtggaagggattgtaaaccacgtggagaccgacgagtgcgtttccgcttgtggggttgatcggaaaaccgtagggatctcgtcagactccttgatggaggcaggtttcgccgctaagctttgctcatccgcttgcttggactattgccctaacattcttgatctctatttcaacctcgccgccggtgaaggtgcatttttacctgatctatgtgatgctcaacggatgaatccccagcgttcgatgatggaattcatcagctccggcgccgcaccaggccctgtctccgaaattgcaccaggccccacctccgaagaagtctcatctcctgctctagctccggcttctatgtaa

SEQ ID NO: 151 - DNA, 405 bp, Arabidopsis thaliana
atggccgccgacggaatattccgcagcatcttcgagggttgtatctccggccttgattccgccatcgaacggcgtccttaccacaaaaactgcggatgtgctcttcacgataaatcaagtggcgctgggaaaaatcaaaatcagcgacggccgccgtcttgtcgccgccacggaagctcagagagcatctcgttcccgatccgaaggtcttggagcgaaggcaacatcatggctatgaatctcttctcctcatcgtcgtcttcttctaatctccaatcgctttcttcgtcttcttcgctctcaaatctggcatcagatttaccggtggataatgctgcgacggaggaaccgagcagatctaataaacagctacgatggacgattgatgaaggtgaagatgattga

SEQ ID NO: 152 - DNA, 1641 bp, Arabidopsis thaliana
atgaaaatggcatcaagaaaaacaacatccttgcttaatcatcttcttcttcttggagctttgactcttttgagcagtttggtgatagtgaaaggagaaagcccttacaagttttacacttggactgtgacttatggcattatctctcctcttggtgttcctcaacaggttattctcatcaatggtcagtttcctggtccaaaacttgaagttgtgaccaacgacaacatcatcctcaacctcatcaacaaacttgaccagcctttcctcttgacctggaatgggattaagcagaggaagaactcatggcaagatggtgttttgggaacaaactgtccgatccaaccaaactcaaacttcacttacaaattccaaaccaaagatcagatcggaactttcaactacttcccttccactgcttttcacaaagccgccggtggattcggagccatcaatgtctacgcaagacctggaattccaatcccttaccctctcccaaccgcagatttcactttactcgttggtgattggttcaaaaccaaccacaaaacgcttcaacagcgtttggattctggtggggttcttccatttcccgatgggatgcttataaatggacaaacccaatcaacgttttcaggcgaccaagggaagacttacatgttgagaatctccaatgttgggttatcaagcactttcaatttcagaatccaaggccatacaatgaaagtagttgaagttgaaggctctcatgttattcaaactgattatgattctcttgacattcacgttggccagtctttagcagttcttgttactttaaaccaatctcctaaagattattacatcgttgcaagcacccggttcataagaagcaagctttctgttatgggtttgttgcgttattctaactctcgcgtcccagcttctggtgatcctcccgctcttccacctggagagcttgtttggtccatgagacaagctagaaccttcagatggaacttaacagcaaatgcagctagaccaaaccctcaaggatctttccactatggaatgatcagtccaacaaagacatttgtcttctcaaattcagctcctttgattaatgggaagcaaagatatgcagtcaatggagtctcttatgtgaaatcagagacgcctcttaaactcgctgatcactttggcatctcaggagttttcagcaccaatgccattcaaagcgtcccatcaaactctccgccaacagttgcaacatcagttgttcaaacatctcaccatgacttccttgaaattgtatttcagaacaatgagaagtcaatgcagtcttggcatcttgatggatatgacttctgggtcgttggatttggttctggacaatggacacctgcaaaaagatcacttcacaatcttgttgatgctctgaccagacacacaactcaggtctacccagagtcttggacaacaatcttagtgtctttagacaatcaagggatgtggaatatgagatcagcgatatgggaaagacaatattcaggacaacagttttatctcaaagtatggaattcagtacagagtcttgccaatgaatacaatcctcctgacaatcttcaactctgtggcaaagctgttggacgacatgtttag

SEQ ID NO: 153 - DNA, 723 bp, Arabidopsis thaliana
atggaaattgcaaccgatacagcaaagcagatgagagacgaagagttgttcaaagcagcggaatggggagattcatcgttgttcatgtcattatctgaagaacagctctctaaatctctcaatttcagaaacgaagatggtcgctctctcctccatgtcgctgcttccttcggccattctcaaatagtgaagttgttatcaagttcagatgaagcaaagactgtaatcaatagcaaggatgatgaaggatgggctcctttgcattccgctgctagcatcggtaatgctgagctcgttgaggtgcttttgaccagaggtgctgatgtcaatgccaaaaataacggtggtcgcactgctcttcactatgctgctagcaaaggccggttggagattgctcagcttttattaacacacggtgcaaagattaacatcacagacaaggttggttgcactccgcttcacagggcagcaagcgtgggaaagttagaagtttgtgaatttcttattgaagaaggagcagagatcgatgctacggataaaatgggtcaaactgcactcatgcattcagttatctgcgatgacaaacaggttgcgttcctgcttataagacatggtgcagatgtggatgtagaagacaaggaaggctacactgttctaggccgagctaccaatgaattccgacctgcacttatcgatgctgctaaggccatgcttgaaggataa

SEQ ID NO: 154 - DNA, 786 bp, Arabidopsis thaliana
atggcatctagagaaatgctgatcataatctcggtcctcgctactacactcattggtttaacagtagctactgaccataccattggtggtcctagtggttggactgtaggagctagtcttcgaacttgggctgcaggacaaacatttgctgttggagacaatcttgttttctcctaccctgctgcgttccacgacgtcgttgaagtcacaaaacccgaattcgatagctgtcaagcggttaaaccgcttataacgtttgctaatggaaactccttggttcctcttactactcctggaaaaaggtacttcatttgtggaatgccgggacattgtagccaagggatgaaacttgaagtaaacgttgttccaaccgcaaccgtagcaccaaccgcaccgcttccaaacaccgtcccatctctaaacgcgccttcaccttcttctgttctacctattcaacctcttttacctcttaaccctgtcccagttctctctccatcttcttctactccacttccttcctcctctctgcctctcattcctccactttctccggcactatctccggctactgcagcggggacttctctgccgttattcccaggctcaccaggtagctctagcagcacaacatccaccaaaaccgtcgggaccttcccttctagtactaccggtacaacggccgatcttgctggcgcagactctcctccggctgactcctcctctgccgcgaaaacacttgttttaggatttggattcatggttgctatgatgcttcatttgttctaa

SEQ ID NO: 155 - DNA, 1227 bp, Arabidopsis thaliana
atgaaaatgcagacgaagaagctctttatcaccattgtctcctttcttctctatgctccattgttcttatcttcaccagttcctgaccctgaatctgtcgttgaagaagttcacaagagcattaatgcgtcggttgcaggaagaaggaagttaggttacctctcatgtacgaccggtaacccaatcgacgactgttggcgttgtgaccctcactgggagcaacaccgtcaacgtctcgctgactgcgccattggattcggcaaaaacgccatcggtggccgtgacggtcggatctacgtggtcaccgactcaggaaacgacaacccagttagccccaagcccggaactttaagacacgccgtggtccaagacgagccactctggatcatcttccaacgagacatgacgattcagctcaaagaagagctaatcatgaactcattcaagaccatcgatggccgtggtgcttccgtacacatctctggtgggccttgtataacgatccagtacgtgaccaacattatcatccatgggattcatatccatgattgcaagcaaggtggcaacgctatggtgcggagctctccacggcatttcgggtggagaacgatatcggacggtgatggtgtctctatctttggaggaagtcatgtttgggttgaccattgttcgttctctaactgtgaagatggacttattgatgctatcatgggctcgacggctatcactttgtctaacaatcatatgacacatcatgataaggtcatgttgcttggtcatagtgatacttacagtcgtgacaagaatatgcaagttaccattgcttttaaccattttggtgaaggccttgtccaaagaatgcccaggtgtagacatggatacttccatgtggtgaacaatgactacacacattgggagatgtatgcgattggtggaagtgctaatcctacaatcaatagtcaagggaacagatttttggcacccaatatcagatttagcaaagaagtgactaagcatgaggacgcgcctgagagcgagtggaagagatggaattggagatcttccggagatttgttgctaaacggtgcgttttttactccgtctggtggtgcagcctcgtctagctatgcaaaggcttcgagccttggggctaaaccgtcttctctagttggaccattgacgtctacttctggtgcactgaattgccgtaaaggttcccgttgctga

SEQ ID NO: 156 - DNA, 858 bp, Arabidopsis thaliana
atggctctcttcgacactcataacacatgggcctttgttttcggcttgctcggaaacctcatttcctttgctgttttcctctctcccgtgccaacgttctataggatttgtaagaagaaaaccacagaaggatttcaatctattccctatgtggtggcgctcttcagcgcgatgctttggctctactacgctactcagaagaaagatgtcttccttctcgtcaccatcaacagctttggttgcttcattgaaaccatatacatctccatctttgttgccttcgcatccaagaaagcccgaatgctaacggtgaagctcttgttgctaatgaactttggagggttctgtttgattctcctcctctgccaattcttggcaaaaggaaccacacgtgcgaagatcattggaggtatctgtgtcggattctctgtctgcgtttttgctgcgccgcttagcattatcagaacggtgataaagacgaaaagtgtggagtacatgccgtttagcttatccttgactcttaccatcagtgcggtcatatggctcctttatggtcttgctcttaaggatatctatgttgccttcccaaacgtgattgggtttgttctaggtgcacttcaaatgatactctatgtggtttacaaatactgcaaaacgccgtcggatttggttgagaaagaacttgaggctgcgaaattgccagaagtgagcatcgatatggtgaagttaggtacactcacatctcctgaaccagtagcgatcaccgtcgtccgatcggtgaacacatgtaactgtaacgatcgaaatgctgagattgaaaatggtcagggagttagaaacagtgctgcaactacttga

SEQ ID NO: 157 - DNA, 552 bp, Arabidopsis thaliana
atgggtttcatttcttcttcatcaccagtagaagagtctcattaccatacacacaagatcttccttttctccaactacatccttctcggcgctgcttcaagttgtatcttcctcacactctctctccgtctaatcccttccatctgcggattcctcctcatcctcctccacgccaccacaatcgccgccgcagtctcaggctgcgctgctgcatcttgcggaagaaaccgttggtacgccgctcacatggttgcaactgtgctcactgctatattccaaggctctgtctctgttctcatcttcaccaacacgtctaaattcctcgggagtcttaagtcgtatgtgcgtgaggaagatgctgctgtgattttgaaactcggtggtggtctttgtattgtgatcttttgtcttgattggatcgttcttgtgtgtgctttcttcttgaagtactatgcttatgtcgatggtggtgatggcgttgcgatgaagagaactggtaaggttcagagtgaggagaatccgaaggactggccatggccgttccaagtttaa

SEQ ID NO: 158 - DNA, 786 bp, Arabidopsis thaliana
atgtatgcagaaactagcttagctttccgattcatgcagagttcttcttctccagagattcaccaatttgaagacctctttaaatcctacaagctctctgatgaaatgaacaatcttgttgaggcaagtgagtatgattttggagaagagagtgacctattcaaagcccctgagccgattattgaagaaccaatgttagctgttgatcccctctctcaagagcttgttgaactcggtgatctcgggtcgttgcagagtgaccaacagcttatagacaaggctttctacgactgtgagcaggacctcctggtgaaatcagccatggagtctccgctctccgaggtactagacatcaagaacatctctttagtggcaaaaatggacaacgatgtgaagagtacgagtgtagtcgtctctgatgtcccaattccgaagagtgtgagctcgggaaacttgagctcaatggatatggtcgagcacaaggatgcggtgattcagggattccctgatttccctccagtggattatgggatgagaagagccttcagtgaaagcgatatacagacactggggactggaaatacgggtcttgttcagtctcagttggatcgaataatcataagttgcacctctgaggaccgccgtgagaagctttctcgatacaggaacaagaagagcaagcgaaatttcgggcgtaaaatcaagtatgcttgtaggaaggcacttgcagacagtcaaccgaggatccgaggaaggtttgcaaaaacagaggagatgcagaaatga

SEQ ID NO: 159 - DNA, 2223 bp, Arabidopsis thaliana; identical to SEQ ID NO: 136

SEQ ID NO: 160 - DNA, 1257 bp, Arabidopsis thaliana
atgggagtgtcaaagaagaaatcaggtgagattagaggagatttaatcccagggttaccagaggaattagcaattgagtgtttggttagagttccttttcagtttcattcttccatcaaatctgtttgccgatcatggaaatgcgttatctccagtcgttcttttatcaaggaacggataggttttggtaaagctgaatctcttctctgccttgttcaacctctgacttcaccaccgtctccggcgatgatggaaggtggtgagatgagtcagaagaagaaagaggaagaagaaggcgagtctcagatgacgcagcagctgctacaaccgcgtattactggaacgccactttacggtttaagcgtttataacgcaacgctggacacgtggcaccgagtcgcgattcctgaacggattcctttgttctgcgaatgcgttgcgattcaggacgcggggaaagtgttgttaatcggcggttgggatccggagacgttgcagcctgtgcgagatgtttttgttctggatttcttcgccggagaaggaagcggaagaaggttcagaagaggcaggccgatgtcggcggcgagatcgtttttcgcctgtgcttctgttggttcgacgaaggtttacgtcgccggaggacatgatgatcagaagaacgctctccgatcggcggaagtgtacgatgtagagaaagacgagtggtcgatgcttcctccgatgacggaaggaagagacgagtgtcacggattctcgatggcgacggatcctggattttgtgttttgagcggttatggaacggagacgcaaggccaattccgatctgacggcgagatttacgatccgattacgaattcatggtcgacaatcgagaatgtctggccgtttcccgatttgagtccgagaggtcgcaccgccgcggctgctgctgaattccccggagattttagaggttgtcggttatggtgttttattgatagcgagagacagagtcagcctcattgggaagttgaagacgattcgatgaaatggaaggtaattatggatacgattcggcttccggtgacgacgatgacttcggtttttgctggaagtttgagtggccaagcggtggcaatgattggcggtggtggtgaagaaagtggaacgatgatggtgaagacgacggcggagaagaatggcgggaagtggagccacgtcaacactccctctggtttttcgagtcttcctttctcgtgttcttcaatctacgtttga

SEQ ID NO: 161 - DNA, 465 bp, Arabidopsis thaliana
atgggagaccaaccacaagagtttcagcaaccacaagtgtatccatctacttcttcttctacttcatcttctttctcgccttcatcctccggttcaagtggctcgtttggtacagcattcatagttctagccgcaattcttgttctggcagcactggcttgtgtgtttggaagactatgcaaccgcggtggaaagcaacacaaagacaaaaacaacaacaaagcttcgaagcatgagaaaccatcgtcaaagaagagccgtgagattagacctgtggagcgtgaaccaagagaaagaggtgatgtggagtttggtttcgatatgaagcggcctggtcctatgagcaaacccactggtcgaaacggaggggacatagaatttgggtttgataacaagagaggaggaggtggtggtggaggaggtggaggaaaaggagggaaaagaccacctccggttatatattaa

SEQ ID NO: 162 - DNA, 492 bp, Arabidopsis thaliana; identical to SEQ ID NO: 137

SEQ ID NO: 163 - DNA, 1431 bp, Arabidopsis thaliana
atgacgaaattgagatcgaaatggttaggtttaagatctgtaaccatcttcttaatcaatttctctctagcttttgctttcgtttccgctgagagaagaggaaaatctctgaggttaagtacagacgaaacgcgggaaaatgaatcaagtttcttccttaaagctatcaattttctatgggaatctgatcaaataggttatcgtcatgtttggcctgaatttgagtttaattggcaaattgtattgggaacacttgttggattctttggagctgcgtttggtagtgtaggtggtgttggtggtggtgggattttcgtacctatgcttagtttgattattgggtttgatcctaaatcagctacagctatttcaaaatgtatgattatgggtgcttctgtgtccactgtgtattacaatcttagattgaggcatccaacacttgacatgcctatcattgattatgatctcgctttactgatccagcctatgcttatgcttgggattagtattggtgttgcttttaatgtgatttttccagattggttggttacagttctactcatcgtcctctttcttggcacgtcaacaaaggcgttcttgaagggttctgagacttggaacaaggagactatagagaaaaaggaggctgctaaacgtttagagtcaaatggtgtatctggcacagaagtggaatacgtgcctcttcccgcagccccgagcacgaaccctggaaacaaaaagaaagaagaagtaagtattattgaaaatgtatactggaaggaactgggacttctcgtgtttgtctggattgtgttcctggcgctgcagatatccaagcaaaatctggctaattgttcagtagcatattgggtcataaatctgttacagattccggttgcagttggtgtatcaggctatgaagcagtagctttgtaccagggtagaagaatcattgcgtctaagggacaaggagactcgaatttcaccgttggtcagcttgttatgtattgtacatttggcataatagcaggcatagtcggtggtttacttggtttaggcggaggtttcatcatgggtccattgttcttggagctcggtgtcccaccacaggtctcaagtgccacagccacttttgcaatgactttctcatcatccatgtctgttgtagaatactatcttctcaaacgattccctgttccatatgctttgtaccttgtgggagtggcaacaattgcagcttgggttggacagcatgtagtcagaaggctaatcgcagccatcggccgcgcatctctcatcatcttcatcctcgcgtccatgatctttatcagtgcgatatcgcttggtggcgtgggaatagtgaatatgatcggcaaaatccaacggcatgagtacatgggtttcgagaacctttgcaagtacggtggctga

SEQ ID NO: 164 - DNA, 669 bp, Arabidopsis thaliana
atggtaaccgtaagccaaagtcacacgacgacgtttctcttcttcaccacatttctcttgatattcggatcaatctcagccgtccgtttgcttccacgaccaaacactacaacaaccaacgatctagatttcatccgaacaagctgcaacgctactctatatccagacgtctgcttcacgtcactctccggctacgcctctgccgttcaagacagtccggcgaggctagccaagctcgcaatcggcgtttcactttcacaagccaaatccactgcggcttttctctccaaactctcacgctctgccgctaaatactccggtgatggccaccaaacagcttccgccgtaatccgagactgcgtttcgaacgtcgaagacgcggtggacgagatgagaggatctctccgtcaactacgcgacatgaacggcagaggaggcggcacggcagctcggaggtcggtagaaacgtttaggttccagatgagtaacgtgcagacgtggatgagtgcagcattgacggatgaggacacgtgtacggatggatttgaagatatggacgaaggaggattgattaagacgaccgtttgtgatcggctcgaggaagtgaagaggctaacgagtaatgctcttgcccttgtcaacacttacgccaacaatggagctccatga

SEQ ID NO: 165 - DNA, 609 bp, Arabidopsis thaliana
atggcaaaacaatatctctttgtactcctctcaatctcctatctcttatcactggagctcacggcggccaccgcagcctcacagaccggagcttccaaaaaagccataaacttcatccaatcttcttgcaaaaccaccacataccctgccttatgtgtccactcactctccgtctacgcaaacgacatccaaacaagccctaaacgtttagctgagaccgctatagccgtgacactaagccgagcccaatccacgaagctcttcgtctcgcgtctaacacgtatgaagggtcttaagaagcgcgaggtcgaagccatcaaagattgcgtcgaggagatgaacgataccgttgaccgtttgaccaaatctgttcaagaactgaagttgtgtgggagtgccaaagatcaagaccagtttgcgtaccacatgagtaatgctcagacttggactagtgcggctttgactgacgagaacacttgctccgatgggttctcgggtcgggttatggatgggaggatcaagaactcggttcgggctagaatcatgaacgtgggacatgaaaccagcaacgctttgtccttgattaatgcctttgctaaaacttactaa

SEQ ID NO: 166 - DNA, 459 bp, Arabidopsis thaliana
atggcagggagaataagctgctgtctaaatcttcctcccctagattcaaattctgcacaatcattagcttcactgctcaagacaacgtcaaagatctcttgtaggagaacagaaaatgagacagagccacggaaaaacaagtgttcttttgtcttgggggtggcggcaactgtcgtaatcggcgggattcagatcaatgatgttgcatcagtggaagctgcggttgtgaaatcgccggtagaagagatggctgcgggtgtggtgccgccgcggaggtggagtgacaagaggacgtgtccgccttggcttgagaactcgctagagaccatcgtaccggagaatcttcctcgtccgtctgctcatcgacgtttggagttagccggattagctaagggtgatgcaccgccggtcggtgtggtgatgacacgtgtcaacaggggtggttgtttctccgtgtaa

SEQ ID NO: 167 - DNA, 1875 bp, Arabidopsis thaliana
atgaacaatattgaagcaactctattcctctgcttcttctgcatcttctcatcttctaatgtgcatttcgccggagctaaacaaaccgccggcaacatcacgccatcggagaatccattcacaccaaaagcttctttgattcgttattggaacaatcacatcaatggcgattcaccaaaaccttcttttttcctctcaaaggcctctcctctaaccgccgtggactccacgcgtttcgcctcactcgcttctaatcacgcgcttaacacgcatcactctgatttctgctccgccgcgaaactcttctgcttccctgagctcgccgctcattccctggaaaaacacggcgatgacgtcaacttcgccgcttacagcggcaagaacttcacaaactacggctccgaccgtctctccggagcagactcattcaaaaactattccggcggtgacaacatcgccgtagactcattccgacgttacagccgaaactccgccggacacgacgatggatttacaaattacgccggagaagtaaacgtagctgaccaaagcttcacaacttacgccaccggaacaacaggaggctccggcgaattcacgaactacaacacagacgcaaacgaaccaaacggaagattcacttcttactccgataaagccaacggaagatcacaaaccttcactacctactccgagaacggcaacaccggatatcaatcattcacaagctacagcaaaaacggaaacggagctccgaatgagttctcgggttacggaaccgggtcaaacgtagttaatacgggttttaccaaatacggagaatccgctaacggagctaacgacagtttcacgagctacggagaaaacggtaatgttccggttaacgaatttaaaggatacggtgacggaggtaacggcgccgtttatgggtttaaaaattacagagaccaatcaaacatcggagttgattctttctcttcttacgctaaaaactcaaacaacgagaaggtcaatttcgtaaattacggtaaatcttttaaccttggctctgataatttcaccggttacggccaagataacgtcggaggtaacgtcagcttcaaaacttacggccaaggacagagttttaaggtttacactaaagacggcgtcgtttttgcgcgttattctaataatgtgagttctaatggcaaaacggtgaataagtgggttgaggagggtaaattcttcagagaagcgatgttgaaagaagggactttgatgcaaatgccggatattaaagataaaatgcctaaaaggacatttttaccccgaaacatagttaagaatttaccgttttcgtcatctacgatcggagagatttggagggtttttggtgccggtgagaattcatcaatggcggggataatctcgtcggcggtttcagagtgtgagagaccggcgagtcacggtgagacaaagcggtgtgttggatcagcggaggatatgatagatttcgctacgtcggtgctcggacgcggcgtagtggtgaggacgacggaaaatgttgtcgggtcaaagaagaaggtcgtcattggaaaagtcaatggaatcaacggtggagatgtaacaagagcagtttcgtgtcaccagagtttgtacccgtatttactgtattattgtcactcggttcctcgggtacgtgtttatgaaacggatctacttgacccgaagagtttagagaagattaaccatggtgttgccatctgtcacattgatacgtcagcttggagtccgagtcatggagcgtttttggctttaggttctggtccgggtcagattgaagtttgccattggatctttgagaatgatatgacgtggaatattattgattaa

SEQ ID NO: 168 - DNA, 1500 bp, Arabidopsis thaliana
atgtctttaagcctttacgacagtgcacattcactagacggtaagtctggttgggatactccggttttctccatgaaagactcaatggatcgtaacccgatggtcacagaagcttgggaggctctctgccagtctcaggtctacttccggggaaaaccggtaggaaccatcgccgcctacgaccatgcttcagaagaggtcttgaactatgatcaggtgttcgtacgtgattttgtaccgagtgctctagcatttctgatgaatggagagcctgaaattgtgaagaactttctcctgaagacacttcatattcagggacaagacaaaatgatcgacaagttcaagcttggtgacggcgcaatgccagcaagctttaaagttctacataatcctatcaagaagacggatacgattatcgctgactttggagaaagcgccatcgggagagtggctccagtcgactctggcttctggtggatcattctcctccgagcttacactaagtctacaggagatcattctctagcagagagaccagagtgccaaaagggaatgagactcatactttctttgtgtctctctgagggttttgatacttttccgactttgctttgcgcagatggttgctcgatggtcgatcgtagaatgggcatttacggctatccgattgagatccaagccctctttttcatggctcttcgatccgcactctcaatgctgaaacatgattctgagggtaaagagttcatggaaaagatagtgaagcggctgcacgcactaagcttccatatgagaagctacttttggctcgatttccagcagctcaatgacatttaccgttacaagacggaggagtactctcacaccgcggtaaacaagttcaacgtaatccctgactccatccctgattggatctttgacttcatgcctctccgaggtggctacttcgttggaaatgtcagtcccgcccgcatggacttcaggtggtttgcgttaggaaattgtatcgcaattctttcctcattggccacaccagagcagtccatggcgatcatggacctgattgaggcccggtgggaagaacttgtgggagagatgccgttgaagatatgttatccggcgatggagagtcacgagtgggggattgtcactggctgtgaccctaagaacacaaggtggagctaccacaacggaggctcttggccagtgcttctatggttactaacggcggcaagcataaagactggacggccacaaatagcacgacgggctatagagttggcggaggcacgactgttgaaggatggatggccggagtactacgacggaaagtctggaagattcatcggaaaacaggctaggaaatctcagacatggtcaatcgctggctatttggtcgccaagatgatgatggatgatccaacgcatgtgggaatgatctcaatggaagaagagaaacatatgaaacctcctcttagaagatcttcttcttggacttaa

SEQ ID NO: 169 - DNA, 630 bp, Arabidopsis thaliana
atgggaacagagatggtcatggttcacgaggttccttttcctccacagatcatcacttccaagccactctctcttctgggccaagggatcacagacattgagatccactttcttcaagtgaagttcactgcgatcggagtttacttagatccttcagatgttaaaacacatcttgataactggaaaggcaaaaccggaaaagaactcgccggcgatgatgacttcttcgacgcccttgcctccgcggagatggagaaggttataagagtggtggtgataaaggagataaaaggagctcagtacggagtgcagctagagaatacggtgagagatcgtttggctgaggaggataagtacgaggaagaagaagaaactgagctcgagaaggtcgttggctttttccagtccaagtacttcaaagctaactccgttatcacttaccatttctcagccaaagatggcatttgcgagatcgggtttgagacggaaggtaaagaagaggagaaactgaaggtggagaatgcgaatgtggtgggaatgatgcagagatggtatttgtccggaagtcgtggagtctcaccgtcgactattgtctccatcgctgattcaatctccgcagttttaacctaa

SEQ ID NO: 170 - DNA, 2079 bp, Arabidopsis thaliana
atggctccaaggttggatttttcagattggtgggcgaaagacacgaggaaaggaacaccagttgtggtgaaaatggagaatcctaattactctgtagttgaaatcgacggtccagattcggcttttagaccagtggagaagagcagaggcaagaacgctaagcaagtcacttgggttttgcttctcaaagctcatagagctgttggatgtctcacttggctcgccactgtcttttggtctctccttggtgccatcaagaaacggcttagtttcactcacccacttggctctgagaaattaggcagagacagatggcttttcactgccattaagctcttcttagctgtttccttagtgattctcggctttgagattgttgcttattttagaggatggcattactttcaaagccctagtcttcacatccccactagcacacttgagatccagagcctgtttcatcttgtgtatgttggttggttaacccttagagctgattatattgctcctcccatcaaagctctctccaagttttgtattgtgctgttccttatacagtcagtagatcgtttggtactttgcttgggttgtttttggatcaagtataagaaaattaagccgagatttgatgaggaacctttccgtaatgatgatgctgagggatctggatctgagtatccaatggttcttgttcagattccaatgtgcaatgagagagaggtgtatgaacaatctatatctgccgtgtgtcaacttgactggccgaaagatcgaatactggttcaggttctcgatgattcgaatgatgaaagcatccaacagttaattaaagctgaggttgccaaatggagccaaaagggagtcaacataatctacaggcatcgcttggttagaactggatataaagctggtaacctcaaatcagcaatgagctgtgattacgttgaagcatacgagtatgtcgcaatctttgatgccgatttccagcctactccggatttccttaaactaacagttccacatttcaaggataacccagagttaggtctagttcaagctagatggacatttgtgaacaaagacgagaacttgttgacccgtcttcagaacatcaatctgtgttttcactttgaggtggagcagcaagtgaacggcgtgttcttgaacttctttggtttcaatggaacagctggagtatggagaatcaaagcccttgaggaatctggtggttggcttgaaaggactactgtggaggatatggacatagcagtccgcgctcatcttcatggatggaagttcatatatcttaatgacgtcaaggtcctttgcgaagttcctgagtcctacgaggcatataagaagcagcaacaccgttggcattcgggacctatgcagcttttccgcttgtgtcttggttcaatcttgacctctaagatagcgatatggaagaaggcgaatctgatacttctcttctttcttcttaggaaactcatacttcctttctactccttcactttgttctgcataatccttccactcaccatgtttgttccagaagctgagctccctgtttgggtcatctgctacataccagttttcatgtctttcctcaaccttcttccatctccaaaatcgtttcctttcatcgttccttatctcttattcgagaacacaatgtctgtcaccaagttcaatgcgatggtgtccggattattccaattgggtagctcttacgagtggattgtcacaaagaaagctggaagatcatcagagtcagatcttttatctatcaccgagaaagagacaccaaccaagaaaagtcaattgcttaggggagtttccgacagcgaacttttggagctgagccaacttgaagaacagaaacaagcggtttcaaagaaacctgtcaagaaaaccaacaagatataccacaaagagctcgcattggcctttcttttgctcactgcagcgcttaggagtctcttggcagcacaaggagtgcatttctacttcctgttattccaaggtgttacctttcttcttgtgggtctcgatctcataggcgagcagatgagctga

SEQ ID NO: 171 - DNA, 360 bp, Arabidopsis thaliana
atgtcaactttcttgataaggatacttcttcctttgcttatcatagcaatgactcttcctcgacgttcagaggcagagtcggaacaatggtgcatagcggatgaacaaacgccagacgatgagttgcaagcagccttagactgggcttgcggaaaaggtggagcagactgcagcaaaatgcagcaggaaaaccagccttgcttcttgcctaacacaatcagagatcatgcctcctttgctttcaacagttactaccaaacttataaaaacaaaggtggttcttgttacttcaaaggagctgccatgatcactgagcttgaccccagccatggttcttgccagtatgagtataacccctga

SEQ ID NO: 172 - DNA, 1185 bp, Arabidopsis thaliana
atgtctaacattcgtccatggttccgtctctctagcatcgctaggcctacagcgcaaggttcaagcgacccacctccacctcaacctcgaccaacctctcgcagttcgctcgtagtcagaccaccggcaaaacaaccgtcacctccacgtcagcgacaacctcgttcacctccacgtcagcaagatcctccttcacctccacgtcagcagcaacagcctcttacccctccacgtcagaaggctcctccaacttcaccccctcaagagcggtccccatatcattcacctccaagccgccacatgtcaccaccgaccccaccaaaggctgcgacaccacctccgccaccgcctcggtcgtcatacacgtccccaccatctcccaaggaagttcaagaagccttaccaccgcgaaaaccgaactcaccaccgagtccagctcattcaagtcggtctacaacatctgagtcagtgaaaactcggtctccatcagagtcagagaatcatcggaaagcaccatcaccgagagtactatcaccttactctctcccagcttctctgttacattccgaacgtgaaaccactcagaaaaacattctcactgccgagaaaacaagccaaacccacgaaacaaatcatcataaccagaatcataaccatgactataaccagaaccataactataaccaaaaccatagctataaccaaaaccaaaaccatcaaggcaacaaccccaagaagatgcatcgtcaaccatcttcgtccgattctgagaacataatgagcacacgagtcatcaccattgcaggtgaaaacaaaggtgcagtaatggagatcctacgatctcctcaaggcaacaaaaccggtggttcaggaacacattcctctagggtttcacacggcaccggagagaaaggacggagacttcaaagcagcagcagtagcagcagcgacgaaggagaaggtaagaagaaaacgacgaagaacgtccctaacaaaggcaatagtaacctcccaatgaaagcttttatgaatagtaacgttcagatgataaacaactccattgtctacaactcgacggcatctcatcatgatcccggcgttcatcttaaaatctcccggaaacctggctccgacaatggttttcatgtcagtgattacggtaataatggcggatacaccaactga

SEQ ID NO: 173 - DNA, 1614 bp, Arabidopsis thaliana
atgggaatttcaaaaccactccctctattttcgattttagtcctctatttttcactctacaccattacaccaacttcttcattagcctccctccaagatcaattcatcaactgtgtccaaagaaacacacatgtttacttcccacttgagaaaacgttctttgctcctacaaaaaatgtctctatgttcagccaagttcttgaatcgacggctcaaaatctccggttcttgaaaaaatccatgcctaaaccgggattcatattcagccctattcacgagtctcacgtacaagcttccatcatttgttccaagaaactccgaatgcatctccgtgtcagaagcggcggtcacgactacgaaggcttgtcttatgtctctcagatcgataaaccgtttatattgatggatctgtcaaagatgagacaggtcaacattaatattcaagacaacagtgcttgggttcaatctggtgccactgttggtgaactttattacaggattgcggagaagagcaaagtccatgggttcccggcgggtttgtgctcgagcttaggcataggaggacacataacaggcggtgcgtacggttccatgatgcggaaatatggtctaggtgcagacaatgttctagacgcaaagattgttgatgccaacggtaaattactcgatagagccgcgatgggtgaggatacattttgggctattagaggaggcgctggagggagttttgggataattctagcatggaagatcaagcttgttcctgttcctaagaccgtgaccgtctttaccgtcaccaaaacgttacaacaagacgtgggtaacaagattatctcaaagtggcaaagagttgcggacaagcttgttgaagagctattcatcagagtgctcttcaacgtagctggaaccggtgggaacaagactgtgacgacgtcgtacaatgctctgtttcttggcgggaaaggaacgctgatgaacgttatgaagaagagtttccccgagctagggctaacatttaaagattgtatcgaaatgagctggcttgaatccattgcttacatttctggattcccgacccacacgcctactaatgttttgcttcaagggaagtctccgttcccaaaggtcagcttcaaagccaaatcggatttcgtgaaaaccccgattcccgaatccgggcttcaagggatcttcaagaagctacttaaagaagatattccattgatgatatggaatccttacggaggaatgatggcgaaaatccccgaatcccaaatcccttttccgcatcgaaaaggagtcctcttcaaggttcagtacgtaacaagttggctagacagtgacaagagaccgagcagacacatcaactggatcagagatctctatagttacatgacgccttatgtctcaagtaacccacgagaagcttacgtgaactaccgtgatttagacctgggaaggaacacgaaagacgtgaaaacatgcatcaaacaagctcaagtctggggagctaactacttcaaaaacaatttcaacagattgatgatgattaaagcaaaggttgatccagagaacttctttagacacgagcagagcattccacctatgatgtaa

SEQ ID NO: 174 - DNA, 1650 bp, Arabidopsis thaliana
aaggagagacacagattcttgtattgatactcacttcagtggagctaagacaagtagaaaaaaaatggcgccaccgcattttctactggtaacgtttccggcgcaaggtcacgtgaacccatctctccgttttgctcgtcggctcatcaaaagaaccggcgcacgtgtcactttcgtcacttgtgtctccgtcttccacaactccatgatcgcaaaccacaacaaagtcgaaaatctctctttccttactttctccgacggtttcgacgatggaggcatttccacctacgaagaccgtcagaaaaggtcggtgaatctcaaggttaacggcgataaggcactatcggatttcatcgaagctactaagaatggtgactctcccgtgacttgcttgatctacacgattcttctcaattgggctccaaaagtagcacgtagatttcaacttccctccgctcttctctggatccaaccggctttggttttcaacatctattacactcatttcatgggaaacaagtccgttttcgagttacctaatctgtcttctctggaaatcagagatcttccatctttcctcacaccttccaacacaaacaaaggcgcatacgatgcgtttcaagaaatgatggagtttctcataaaagaaaccaaaccgaaaattctcatcaacactttcgattcgctggaaccagaggccttaacggctttcccgaatatcgatatggtggcggttggtcctttacttcccacggagattttctcaggaagcaccaacaaatcagttaaagatcaaagtagtagttatacactttggctagactcgaaaacagagtcctctgttatttacgtttcctttggaacaatggttgagttgtccaagaaacagatagaggaactagcgagagcactcatagaagggaaacgaccgtttttgtgggttataactgataaatccaacagagaaacgaaaacagaaggagaagaagagacagagattgagaagatagctggattcagacacgagcttgaagaggttgggatgattgtgtcgtggtgttcgcagatagaggttttaagtcaccgagccgtaggttgttttgtgactcattgtgggtggagctcgacgctggagagtttggttcttggcgttccggttgtggcgtttccgatgtggtcggatcaaccgacgaacgcgaagctactggaagaaagttggaagactggtgtgagggtaagagagaacaaggatggtttggtggagagaggagagatcaggaggtgtttggaagccgtgatggaggagaagtcggtggagttgagggaaaacgcaaagaaatggaagcgtttagcgatggaagcgggtagagaaggaggatcttcggataagaacatggaggcttttgtggaggatatttgtggagaatctcttattcaaaacttgtgtgaagcagaggaggtaaaagtaaagtaaataaaggacaaaagagttggtgtctagaagtggcggagtgttatttgctaatactgtcactttgtaatatcaaattcaattaaaacataaaatttactccatctagataaatatgttttttgaataatggtcaattacaaaacatgtttgattgaatcacctttttgagactctcc

SEQ ID NO: 175 - DNA, 6231 bp, Arabidopsis thaliana
tcctctccggccttttctctctcctctcttcgaccgtcgtcgccggagacccttttcaagcggccaaacaaagatgcaagcttttttctttaatactactgtagcactatcgcatccgatgctgttttagattttgggtactctgcttctctttctcttcatcttcctctgttcgtcgtcagctgagtttgattgtcggaaaatatggctcaaagaagggaacctgatccgcctccaccgcagaggcggattctgcggactcagactgttggtagtctcggagaggctatgcttgatagtgaagttgttccctcttctttagttgagattgctccgattctacgtgtggctaatgaagttgaagctagtaatccacgagttgcttacctatgtcgtttctacgcatttgagaaggcgcataggcttgatccaacttcaagtggtcgtggtgttcgccagtttaagaccgcgcttcttcaacgattagaaagggagaatgaaacaactttggcaggaaggcaaaagagtgatgcacgtgaaatgcagagtttctatcaacactactacaagaaatacatccaagctttgctgaatgctgcggataaagctgaccgtgctcaacttacaaaggcctatcaaactgctgccgttctctttgaagtcttgaaggctgttaatcaaacagaagatgtggaagtggctgatgagattttggaaacgcacaataaggtggaagagaagacccagatttacgtgccttacaatatacttccccttgaccctgatagtcagaatcaggcaataatgagattgcctgagatacaagctgctgtagccgctcttagaaatacaaggggattaccatggacagcaggtcacaagaagaaactcgatgaagacattctagactggcttcagtctatgtttggttttcagaaagataatgttttgaatcaaagagagcacttgatcttgttacttgctaatgtccacatccgacaatttccaaaacctgaccaacaaccaaagttggatgatcgtgccttgaccatagtgatgaagaaacttttcagaaactacaaaaagtggtgcaaatacttgggtcggaaaagcagcctttggttgcctactattcagcaagaggtacagcagcgtaaactgctctacatgggactttatctattaatatggggagaagctgcaaacctgagattcatgccagaatgcctctgttatatatatcaccatatggctttcgagctttatggtatgttggccggtagtgttagtcccatgacaggggagcatgtaaagccagcgtatggtggtgaagatgaagctttcctgcagaaagttgtgactcctatataccagacaatatcaaaggaagcaaagagaagtagaggaggaaagtcaaagcattctgtgtggagaaactatgatgacttgaatgaatatttttggtcaattcgatgttttcgcttagggtggccaatgcgggctgatgctgatttcttttgtcagacagctgaagaacttcgacttgagagaagtgagataaaatcaaacagtggagatcggtggatgggcaaagtcaattttgtggagatacgctcgttctggcatatatttagaagttttgatagattgtggagcttttatatcctgtgtttgcaggcaatgattgttattgcatggaatggatccggagagttaagcgccatttttcagggtgatgtcttcctaaaggttttgagcgtcttcattacagcagctatactaaagcttgcacaagctgtccttgacatagccctcagctggaaggcaagacatagtatgtcactctatgtgaaactcagatacgtcatgaaggtaggtgcggctgcagtatgggttgtagtcatggcagttacttatgcgtacagctggaaaaacgcctccggtttttctcagaccataaagaattggtttgggggacacagccataattcaccttctcttttcatagtggcaattcttatctacttatccccgaacatgctttctgcgttgctgtttttgtttccattcattcggcgctatcttgaaaggtctgactataagataatgatgctgatgatgtggtggtctcagcctcgtctgtatataggaaggggtatgcatgagagcgctttgtcacttttcaagtacacaatgttttggatcgttctgctgatttcaaagctggcattcagttattacgctgagattaagccccttgttggtccaaccaaagatataatgcgaatccatatatccgtctacagctggcatgagtttttccctcacgccaagaataatttaggagtcgtcatcgcgctctggtcaccagttattctcgtttatttcatggacactcaaatatggtatgctatagtttcaactctggtcggaggtttaaatggagctttccgccgtcttggagagatccgaacacttggaatgttgaggtcgagatttcagtccataccaggggcctttaatgattgcttggtaccacaagataacagcgatgatacaaagaaaaagagatttagggcgaccttctctcgcaagtttgatcagctcccatctagtaaagacaaggaagcagcgcggtttgctcagatgtggaacaaaataatcagtagtttccgagaagaggacttgattagtgatagggaaatggaactattgcttgtgccatattggtctgaccctgatttggatcttatccggtggccaccttttctattggctagtaagatcccaatagctttggatatggctaaagacagcaatggaaaagaccgtgaactgaaaaagagattagctgttgacagctacatgacttgtgcagttagagagtgctatgcctcttttaagaatctcatcaattatttggtggtcggagaacgagaaggacaggtcataaacgacattttctccaagattgatgaacatattgagaaggaaacgctgataacagaattgaacctgagtgctcttcctgatctgtatggccagttcgttcggctaatcgaatatttgctagaaaacagggaggaggacaaggatcaaattgtaattgtcttgctgaacatgttagaattggtgactagagacatcatggaagaagaagtcccaagcttactagagactgcccacaatggatcttatgtcaagtatgacgtcatgacccctcttcatcaacagcgcaaatatttcagtcaacttcgattcccagtttattctcaaacggaagcttggaaagaaaaaattaagaggcttcatcttttgcttactgtcaaggagtcagctatggatgttccatccaacttggaagctcgaaggcgtcttactttcttttcaaattcactattcatggacatgcctcctgcacccaagatccgcaacatgctttccttctcggtccttacaccatacttttcagaggatgttcttttctccatatttggcttagaacagcaaaatgaagatggagtttctatactcttttacttgcagaagatcttcccagatgaatggacaaactttctggaacgagttaaatgtggcaacgaagaagaactaagagcaagagaggatttggaagaggagcttcgtctttgggcatcttacagaggccaaactctgactaaaactgtgcgaggaatgatgtattaccgaaaggctttggaacttcaggccttccttgatatggcaaaggatgaagaattattaaaaggctacaaggctctcgagttaaccagtgaagaagcatcaaagagcggagggtcactttgggcgcagtgtcaagcacttgcagatatgaagttcacctttgtggtttcttgtcaacaatacagtattcataagagatctggcgaccaacgtgctaaagacatattgagacttatgacgacgtatccgtctattcgtgtcgcctatatcgatgaggtagagcaaacacataaagaaagttataaggggacagaggagaaaatttattactcagcgcttgtaaaagctgctccacagaccaaaccaatggattcttctgaatctgttcaaacactagatcagctcatttatcggattaagcttccgggaccagctatactaggagagggaaagccggaaaatcagaaccatgctatcatatttacccgtggagaagggttgcagacgatagacatgaatcaggacaactacatggaggaagctttcaaaatgaggaacttgctgcaagagtttcttgaaaagcatggaggcgtaagatgtcctacgattcttggtcttagagagcatattttcactggaagtgtgtcttctcttgcatggtttatgtcaaatcaagagaacagttttgtaacgattgggcaaagagtgctagctagtcccttgaaagtacgattccattacggacatccagatatttttgatcgtctgtttcaccttaccagaggtggtatctgcaaagcttctaaagtcatcaatcttagtgaagacatatttgcaggttttaattctactctgcgtgaaggaaatgtgactcatcatgaatatatacaagttggtaaagggagagatgtgggcctcaaccagatctcaatgtttgaggcaaaaatcgccaatggaaatggcgagcaaactttgagtcgcgacctttataggctaggacaccgatttgatttcttccggatgctgtcttgttatttcaccacaattgggttctacttcagtaccatgttaaccgtgcttacggtgtatgtgtttctttatggacggttatatctagtacttagtgggcttgaagaaggattgagtagccaacgagctttccgtaacaataagcctcttgaggcagctcttgcttctcaatcatttgtgcagattggttttttaatggctttgcctatgatgatggagattggacttgagagggggttccacaatgcattgattgagtttgtgctgatgcagttacaacttgcttccgtctttttcacgtttcagctcgggacaaaaacacattactacggaaggacattgtttcatggaggcgcagagtatagaggaactggtcgagggtttgtggtcttccacgcgaaatttgctgagaactataggttctattcccgtagtcactttgtgaagggcattgaacttatgattcttctactggtatatcagatctttggtcaatcatataggggtgtggttacttatattctgatcactgtttcgatatggttcatggtggtgacatggctctttgctcctttccttttcaatccgtctggttttgagtggcaaaagattgttgatgactggacagactggaacaaatggatttataaccgaggaggaattggtgtccctcctgagaagagttgggaatcttggtgggagaaagagttagaacatcttagacattcaggggttcgtggtatcacccttgagatctttttggccttgcgcttcttcatctttcaatatggacttgtgtatcatctcagtaccttcaaaggaaaaaatcagagcttttgggtttatggagcgtcatggtttgtgatcttattcattctactgattgtgaagggtttgggcgttggaaggcgaagattcagcacgaatttccagcttctattcagaatcataaagggtcttgtgttcctcacatttgtggcaattctcataactttcctcgcacttcctctgataacaatcaaagacttattcatctgcatgcttgccttcatgccaactggatggggaatgcttctcattgcacaagcgtgtaagcctctgatccaacagctagggatatggtcatcagttaggacgctagctcgaggctacgagatcgtgatgggcttgcttctgttcacaccagttgcgtttttggcctggtttccttttgtgtctgagttccagacaagaatgctctttaaccaagcctttagtagaggtctacaaatctctcgtattcttggtggtcaaagaaaagaccggtcttcaaaaaacaaggagtgacatgtacacatgtaaatggcgtatgtgtagatttaatggttatctgttattgtttccttcccaagtaatctatagttagaaagttcctgtaactttcatagatatatgttaattattttccatttccataagttcgcgtccattataatagaaagtgcatgagacgtatctttt

SEQ ID NO: 176 - DNA, 5991 bp, Arabidopsis thaliana
atggcgagtactagtagtggtggaagaggcgaagatgggcggccgccgcaaatgcagccagttcggtctatgtctcggaagatgacacgagctggtacgatgatgattgagcatcctaatgaagatgaaagaccaattgacagcgagcttgttccttcttctctcgcttccattgctcctattcttcgagttgctaatgatattgaccaagataacgcaagggttgcttacctttgtcgcttccatgcatttgagaaggctcatcgaatggatccaacatcaagcggacgaggcgttcgtcaatttaagacttatctattgcacaagctagaggaggaggaagagattacagaacatatgttggcgaagagtgacccaagagaaattcagctctactatcagacgttctatgagaataatatacaagatggagaagggaaaaagacaccggaggagatggccaagctttaccagatagcgacagtcttgtatgatgttttaaagacagtggttcctcaagcaagaattgacgacaagacccttaggtatgccaaagaagttgaaagaaagaaagaacagtatgaacactacaacattcttccgctgtacgctttaggggctaaaactgcagtaatggaactccctgagattaaggcggcaattcttgctgtctgcaatgtggacaatcttcctcgaccaagattccattcagcctcagctaacctggatgaagtggatagagaaagaggcagatcttttaatgatattctcgagtggcttgctttggttttcggttttcagcgaggaaatgtagctaatcagagggagcatcttatactgctacttgccaacatcgatgtgaggaagagggatctcgagaattatgtcgagataaagcctagcaccgtgcggaaattgatggaaaaatacttcaagaattacaattcatggtgcaagtatttgcggtgtgactcatatttgaggtttcctgcaggttgtgataagcaacaactgagccttctgtatatcggcctttatcttctcatatggggagaagcatcaaatgtccgcttcatgcctgaatgcctttgctacattttccacaatatggccaatgaagtccatggaattctgtttggcaatgtgtaccctgtaactggggacacatatgaggcaggtgcaccggacgaagaagcattcttaaggaatgttataacaccaatctaccaggtcttacgcaaggaagtcaggagaaacaaaaatggaaaggcaagccattcaaaatggagaaactatgatgatctgaatgagtacttttgggataagaggtgttttaggctgaaatggccaatgaactttaaggcagattttttcatccacactgatgagatctcgcaagttccgaatcagagacatgaccaagtgtctcatggaaaaaggaaacctaaaactaattttgttgaagctcgcacgttttggaacctctatcgaagtttcgaccgaatgtggatgttccttgtattgtctctacagactatgataatagttgcatggcacccgtcaggatctattcttgccatttttactgaggatgtctttagaaacgtgttgaccattttcataacttcagcttttctcaatcttctacaagcgacactggatttagttcttagttttggtgcttggaagagcctaaagttttcccaaattatgcggtacatcacaaaatttttaatggcagccatgtgggccatcatgttgccaattacttactcgaagtcagtccagaatcctactggactaataaagttcttcagcagctgggttgggagttggcttcaccggtcgttatacgactatgctattgccttgtatgtcttaccaaatattttggctgctgtgtttttcttacttccacctctgcggagaatcatggagcgatcaaacatgcggattgtcacacttatcatgtggtgggctcagccaaaattgtatattggtagaggaatgcatgaagaaatgtttgcacttttcaagtatacattcttttgggtcatgctgttacttagcaagctcgctttcagctactatgtggagatattaccacttgtcaacccaactaagttaatatgggatatgcatgtcgtaaattacgagtggcatgagttctttccaaatgccactcataacattggggtaatcatcgccatatggggtccaattgtcttggtttactttatggatacgcaaatatggtatgccatattctctactctttttggagggatatatggagccttcagccatctcggggagatacgcacacttggaatgttgcggtccagatttaaagttgttccatctgctttctgttctaaacttacaccgttacctctaggtcatgcaaagagaaagcacttggacgaaacggtggacgaaaaagacattgcgaggttctcacagatgtggaataagttcatacatactatgcgggatgaagatctgatcagcgatagggaaagagatttgctacttgtaccttcgtcttctggagatgttactgttgtgcaatggcctcctttcttgcttgctagcaagattccaatagcattagacatggctaaagatttcaagggaaaagaggacgttgacttattcaagaaaatcaaaagcgaatactatatgcattacgcagtggttgaggcttatgaaaccgtgagagacataatatatggccttcttcaagatgaatctgataagaggattgtaagggagatttgctacgaagtagatattagcatccaacaacacagatttttaagtgaattccggatgactggtatgcctttgctcagtgacaagctagagaaattcttaaaaatcctgctaagtgattatgaggaagatgattacaagtctcagattatcaatgttctccaggatattattgaaatcatcacccaggatgtcatggttaacggtcacgaaatccttgaaagggctcatttacagagtggtgatattgaaagcgacaagaaagaacaaaggtttgaaaagatagatcttagtttgactcagaacatatcctggagggaaaaggttgtaagacttttgttacttttgactgttaaagaatccgcaataaatatccctcaaagtttggaagctcgtcgtcgtatgacattctttgcaaattccttattcatgaatatgccagatgctccccgagttcgtgacatgttatcctttagtgtcttaactccttattacaaagaggatgttctctattcggaggaagaactgaacaaggaaaacgaagatggaataactattttgttttacctacagaggatatatcctgaggaatggtcaaactattgcgaacgtgtaaatgatttgaaacgcaacttatctgagaaagacaaggcagagcaactccgccaatgggtatcttatagaggccagactctttcaaggacagttaggggaatgatgtactacagagtggctctcgaacttcaatgtttccaggaatacactgaagaaaacgctaccaatggtggctatcttccctcagaatcaaatgaagatgatcgaaaggcttttagtgaccgtgcacgagctcttgcagatttaaaatttacatatgtcgtgtcctgtcaggtctatgggaaccagaaaaagtcaagtgaaagccgagaccggagttgttacaataacattttacagctcatgctaaagtatccgtcattgcgtgttgcctatatagatgaaagggaggagacagttaatggaaaatcacagaaagtattctactctgtgctactcaaaggatgtgacaaattggatgaggaaatatatcgtatcaaacttcccggccctcccactgaaattggtgaaggaaaacccgagaatcaaaaccatgccatcattttcactcgcggtgaagcactccagaccatagacatgaaccaggacaactactttgaagagtgtttcaaaatgagaaacgtgctacaagaatttgatgaaggtcgacgtggcaagagaaatcctacaattttgggtcttcgtgaacacatatttactggaagtgtttcttcacttgcttggttcatgtcgaatcaagaaacaagttttgtaaccattggccaacgtgttctggcaaatcctctgagggtgcgtttccattatggccatcctgatatatttgatagaatcttccacatcacaagaggaggcattagcaaggcttcaaagataataaacttaagcgaagatatctttgcagggtacaattcaactcttcgtgggggttacgtcacacatcacgagtatattcaagcagggaaaggtcgtgatgtagggatgaatcagatttcgttttttgaagccaaagttgcgaatggtaatggagaacaaacactaagtcgtgacgtttaccgacttggacgccggtttgatttttacaggatgctttcattctacttcaccacagttggtttctatttcagtagtatgataacggtgctcacggtatatgtgttcctttatgggcgtctttatctggtattgagcggattagaaaaaaacatcctgcaaagtgcaagtgtacatgagtccaatgcccttgagcaggcactagcagcccaatctgttttccagttaggttttctgatggttctaccaatggttatggaaattggcctagaaaaagggtttcgcacagccttgggtgatttcatcataatgcagctgcagcttgcctctgttttcttcacgtttcaactgggaacgaaagcgcattactttggaaggacgattttgcatggaggctctaagtaccgagcaactggtcgaggttttgttgttttccatgcgaagtttgcagaaaactatagactatattcgcgaagccattttgttaagggactggagttggtcatactactagttgtgtatcaagtttatggaacttcgtaccgtagctcaagtacttatatgtacatcacattttcaatgtggttcctggtgacttcttggttgtttgctccatttatattcaacccatctgggtttgagtggcaaaagacggtggacgattggactgactggaaacgttggatgggaaaccgcggtggcataggaattgttcttgacaaaagttgggaatcatggtgggatatagagcaagaacatctcaagcacacaaatttaagaggaagggttctagagatacttctcgctctgcgttttctcctttaccagtatggaattgtctaccacctcaacatcgctcgccgccacacaacatttctggtttatggactctcttgggctatcttgttgtcagttcttctcgtgctaaagatggtatcaatgggtagacggaagtttggtacagattttcaggttatgttcaggattctcaaggcacttctcttccttggtttcttgtcagtcatgactgtattatttgtcgtctgcggcctcacgatctcggatctctttgcctccatcctcgctttcttacctactggctgggctattcttcttatcgggcaagcgctgcgtagcgtgttcaaaggattaggattctgggactcggtgaaagagctagggagagcttacgagtatataatggggcttgtgatattcacacccattgctgtcttatcgtggttcccatttgtgtctgagttccaaactagattactgtttaatcaagccttcagtcgcggtctgcagatctctatgattctcgccggaaagaaagacaaagagacaccttccaccaagtacctaggccatacggaagagtcctttggacttgaacatgatacaaatacctttaaccattattacctttggacttgaacatgatacaaatacctttaaccattattaatctgtctatgtaacaaaagatgtgtcactctattcttctttttttcgttgtctcttttatatgattaaacaatgtattgaggt

SEQ ID NO: 177 - DNA, 5925 bp, Arabidopsis thaliana
gatctctctctctctcccttcttcttcttcttcttcttcctctcgtcgccatttttttttcctctgtatctgttcatgcccgacgcctaactgagtcacctcgtctctgcttcagggaaggggatctgaaagctcttcgcatctaacggagagatggcacagagtagtacatctcatgactcaggccctcaggggctcatgagacggccatctcgtagtgctgccacaacagtgtctattgaagtttttgatcatgaggtggttccggcctcccttggtaccattgctcctattctgcgtgttgctgcagagattgaacatgagcgccctcgtgttgcctatctctgtcggttttatgcatttgagaaagctcacaggttggatccaagctctggtggtcgaggtgtgaggcagtttaagacacttctctttcaaagattagaaagggacaatgcttccagtcttgcttctagggtgaaaaaaactgatggacgggaagttgagagcttctatcaacaatattatgagcactatgtcagggcacttgatcaaggagatcaagcagacagagctcagcttggtaaagcataccagacggctggagtgctctttgaagtgctcatggcagttaacaagagcgagaaagttgaagcagtagctcctgagattattgcagctgctagagatgtccaagaaaagaacgaaatttatgcaccctacaacattcttcctttggattctgctggggcctcgcagtctgttatgcagcttgaggaggtcaaagccgctgtagctgctttggggaacactcgtggattgaactggccatctgggtttgagcagcaccgaaagaaaaccggaaatctggatcttcttgactggttaagagctatgttcggattccagagagacaatgtcagaaaccagagggaacatctggtttgtttatttgctgataatcacataagattgactcccaagccagaacctctgaacaagctcgatgacagagccgttgatactgtcatgtcaaagctctttaagaactacaagaattggtgcaaatttttaggacgtaaacacagtttaaggcttcctcaagctgctcaagatatacaacagcggaagatactatatatgggcttgtatcttctcatctggggagaagctgcaaatattcgcttcatgccagaatgcttgtgctatattttccacaatatggcttatgaactccatggtctcttggctggaaatgtcagcatcgttaccggagaaaatattaagccttcttacggtggagatgatgaggcatttttaaggaaggtcattacaccaatctaccgtgtagttcaaacggaagcaaacaagaatgcaaatggcaaggctgctcactcagattggtccaactatgatgatctgaacgaatatttctggactcctgattgcttctctcttggctggccaatgcgtgatgatggggatcttttcaaatcaacccgtgatacgacacagggaaagaaaggatcgtttagaaaagcaggacgcacaggcaaatcaaatttcaccgaaactcggacattttggcacatatatcatagttttgaccgactctggacattctatctattagccctgcaggcaatgatcattctagcatttgaacgagtagagctgagagaaatcttacgcaaagatgttttatatgctctctcaagtatcttcatcacagcagcttttctgcgcttccttcagagtgtcctggacgttatcttaaacttcccaggtttccacaggtggaaatttactgatgttttgagaaatattctcaagatcgttgtcagtctcgcttggtgtgttgtgttacccctttgctatgcccagtctgtctcttttgctcctgggaagctgaaacaatggctatcatttcttccacaagttaaaggcgttcctcctctttatatcatggctgttgcactgtacttgcttccaaatgtactggcagctatcatgttcatttttccaatgcttcgacgctggatcgagaattcagactggcatatatttagattgcttctgtggtggtcacagccaagaatttatgttggaagagggatgcatgaaagtcaaattgcactcataaagtatacgattttctggctgttgcttttctgctgcaaatttgcattcagctactttctacaggtgaaacttttggtgaagccaactaacgcaattatgagcattcgccatgtaaaatacaaatggcatgagtttttccccaatgctgagcacaactatggagctgtggtgtcactctggttaccagtaattctggtttactttatggacactcaaatttggtatgctattttctccactatatgtggtggtgtcattggggcctttgatcgtttgggagagatacgaacgcttggaatgctaaggtcaaggttccaatcattacctggtgcatttaatacgtacctggttccttctgataaaacaaggagaagagggttttccttgtcaaaaagatttgcagaggtcactgcagcaagaagaactgaagcggcaaaattctcccaactctggaatgaaatcatttccagcttccgagaggaagatctaatcagtgacagggagatggatctgttgcttgttccttatacttcagaccctagtttgaaactaattcagtggccaccatttttgcttgcaagcaagataccgatagcattggatatggcagctcagtttcgaacaagagattctgacctctggaagcgcatatgcgcagacgaatatatgaaatgtgctgtcattgaatgctacgaatctttcaaacatgtcttgcacaccttggtaattggggagaatgagaaaaggattattggtattatcatcaaagaggtggagagcaacatatcaaagaattccttcctttcgaatttcagaatggcgcctttacctgctctttgtagtaaatttgtcgagcttgttggaattttgaaaaatgcggacccagcgaaaagagacacagtggtgctattgttgcaagatatgttagaagtagtgactcgagatatgatgcaaaatgaaaaccgtgaattggtagaacttgggcatactaacaaggaatccggaaggcaactctttgctggtactgacgcaaagcctgctatactgtttcctccagtggcaacagctcaatggcatgaacagataagtcgccttcatttacttttgacggtaaaagaatctgcaatggatgttccaacaaaccttgaagcacaaagaaggattgccttcttcacaaattcactgtttatggatatgccacgagctcctcgtgtcagaaatatgctgtccttcagtgttctgactccgtactatagtgaggaaaccgtctactctaagaacgacctggaaatggagaatgaagatggtgtatcagttgtatactatttgcagaagatctttccagatgagtggactaacttcttggagcggcttgattgtaaagatgaaacttctgttttggagagtgaagaaaatatattgcagcttcgccattgggtttctttgaggggacagactttgtttagaacagttagaggaatgatgtattacaggcgggcattaaagcttcaggcttttcttgacatggctaatgaaacagaaatattagcagggtacaaagccatttcagagccaactgaggaggacaagaaaagtcagagatccttgtacactcagttagaggcagtggcagatctcaaatttacttatgttgctacctgtcagaattatggaaatcagaagcgaagtggagaccggagagctactgacatcttgaacctgatggttaacaatccctctctccgtgtagcatacattgatgaggttgaggaacgagaaggcggaaaagtgcagaaagttttctactcggtgcttatcaaggctgttgataatcttgatcaggaaatatatcggataaaactacctggaccagcaaaaattggagaaggaaaacccgaaaatcagaatcatgctctcatttttactagaggagaagctctccaggctattgacatgaatcaggaccattacttggaagaagcacttaaaatgaggaatctgctggaagagttcaatgaagaccatggagtacgtgcacccactattcttggtttcagagagcatatttttactggcagtgtttcttctttagcctggtttatgtcaaatcaggaaacaagttttgtgaccattggtcagcgagtcctggcaagtcctttgaaggtaaggtttcactatggacaccctgatgtcttcgatagaatcttccacatcactcggggtggcatcagcaaagcttcacggggcataaatcttagcgaggatatctttgctggtttcaactcaactctgaggcgtggtaatgtcacccatcatgagtacatccaagtagggaaaggaagagatgttggtttgaaccagatatcactctttgaagccaaggttgcttgtggaaacggagagcaaacattgagtagggatctctaccgacttgggcatcgttttgactttttccgcatgatgtcttgttatttcacaactgtaggcttctacatcagctcgatgattgttgtcctcacagtttatgcattcttgtatggaagactttacttgtcattgagtggagtggaagaggcgatagtaaagtttgcagcagcgaaaggagatagttctcttaaggcagcgatggcgtcacagtccgtagtgcaattgggtctgctgatgacactaccaatggtgatggagattgggctagagagaggattcagaacggcgttgtctgatctaatcataatgcagcttcagttagcgcctgtcttcttcaccttctcacttggaacaaaggttcattactatggtcggaccatcctacatgggggatcaaagtacagagcaacagggcgtgggtttgtggtgaagcacgagaagtttgcagagaactacagaatgtattcgagaagccactttgtgaaaggaatggagctgatggtgctgctgatatgttacaggatttatgggaaagcagcagaggactcggtgggttatgcgcttgtcatgggctcaacatggttcctggtgggttcctggttgttcgccccattctttttcaatccctcgggattcgagtggcagaagatagttgatgactgggatgattggaacaagtggataagcagcagaggaggtatcggagtaccagcaaacaaaagctgggaatcatggtgggaagaggaacaagagcatcttcttcactctgggtttttcggaaagttctgggagatatttctctcactgcggtacttcatttaccagtatggtattgtgtaccaattgaacttgaccaaggagagccgaatgggaaaacagcacagcatcattgtgtatggactgtcttggctggtgatcgtggcagtgatgatagtcctcaagatagtgtcgatggggagaaagaagttcagtgctgatttccagcttatgttcaggcttttgaagctgtttctgttcataggatcagtggtgatcgtggggatgctattccacttcttgaagctgaccgtgggagacataatgcagtctctgttggcgtttttacccacgggatgggctctccttcagatatcacaagtggcgaggccattgatgaagacagtaggaatgtggggatcggtcaaggccttggctagagggtatgagtacatcatgggagttgttatcttcatgccagttactgtactcgcgtggttccctttcgtctctgagttccagacaaggcttctcttcaatcaagcctttagccgtggtctccagatccaacgtattctcgccggtggtaagaagcagaaataa

SEQ ID NO: 178 - DNA, 6067 bp, Arabidopsis thaliana
gtggtcctccgcttctcttttcagtttatttttagtaggatctagaagatcatggctcaaaggaaaggacctgatccgcctccgcctcaaaggcggattctgcggactcaaactgctggtaatctcggagaggctatgttggacagtgaagtggtgccatcgtctcttgtggagattgctccgatccttcgtgtagctaatgaagttgaagctagtaacccccgtgttgcttacttatgtcggttttatgcgtttgagaaggcacacaggcttgatcccacatcaagtggacgtggtgttcgccagtttaagactgcgcttcttcaacggttagaacgggagaatgaaacaactcttgcaggaaggcagaagagtgatgcacgcgaaatgcaaagtttctatcaacactactacaagaaatacatccaagctttgcaaaacgccgctgacaaagctgaccgtgctcaacttacaaaggcatatcaaactgctgctgttctctttgaagtcttgaaagctgttaatcagacagaagatgtggaagttgctgatgagattttggaggctcacacaaaggtggaagaaaaaagccaaatctacgtgccttacaacattcttccccttgatcctgatagtcaaaatcaggctataatgagatttcctgagatacaagctacagtaagcgcacttcgtaacactaggggtttaccatggccagctggtcacaagaagaaactcgatgaagacatgctagactggcttcaaactatgtttggttttcagaaagataatgtttcaaatcaaagagagcacttgattttgttacttgctaatgtccacattcgacagtttccaagacctgaacaacaaccaaggctggatgatcgtgcattgactatagtgatgaagaaacttttcaaaaactacaaaaagtggtgcaagtatttgggtcggaagagcagcctttggttgccgacgattcaacaagaggttcagcagcggaaactgctatacatgggactctatcttttaatatggggagaagctgcaaacctgagatttttgccagaatgcctttgctatatatatcaccatatggcttttgagctgtatgggatgttggctgggagtgttagtccaatgacaggggagcatgtaaaaccggcatatggtggtgaagacgaagctttcctgcaaaaagtagtgactcctatatacaagacaatagcaaaggaagcaaagagaagtagaggaggaaaatcaaagcattctgagtggagaaactatgacgacttgaatgaatatttttggtcaattcggtgctttcggttagggtggcctatgcgagctgatgctgatttcttttgtcagacagcggaagaacttcgacttgacagaagtgagaataaaccaaaaactggagatcgatggatgggcaaagtcaattttgttgagatacgctccttctggcatatatttagaagtttcgatagaatgtggagtttctatatcctgtctttgcaggcaatgatcataattgcttggaatggatctgggaaattaagcggcatcttccaaggtgatgtcttcctaaaggttttgagcatcttcattacggcagctatattaaagcttgcacaagctgtccttgatatagctctaagctggaaatcaagacatagtatgtcattccatgtgaagctcagatttatcttcaaggcagttgcagctgcaatctgggtggttctcatgccactaacttacgcatacagctggaagaccccttctggttttgcagagaccataaagaactggtttgggggacaccaaaattcctcaccttcctttttcattattgtcattcttatctacttatccccaaatatgctctctacattgctcttcgcgttcccattcatccgacgttatcttgaaaggtctgactataaaatagtgatgcttatgatgtggtggtctcagccgagactctatatagggaggggtatgcatgagagtgcattgtcacttttcaagtacacgatgttctgggttgtacttctaatatcaaagcttgcattcagtttttatgcagagattaagcctcttgttaaaccaaccaaagacattatgcgagttcatatatcagtctaccgctggcatgagtttttccctcacgccaagagtaatatgggtgtggtgatcgctctctggtcacctgttattcttgtttatttcatggacactcaaatatggtatgctatagtttcaactctggtgggaggtttaaatggagcttttcgacgtcttggagagatccgaactctaggaatgttgaggtctagatttcagtccttaccagaggcctttaatgcttgcttggttccaaatgagaagagcgaaactccaaagaaaaaggggattatggcgaccttcactcgcaagttcgatcaggttccatctagtaaagacaaggaggccgcacgatttgctcagatgtggaacaaaataatcagtagtttccgagaggaggatttgattagcgatagggaaatggaactcctgcttgtgccatattgggctgaccgtgatctggatcttatccgctggccaccttttctgctggctagtaagatcccaatagctttggatatggcaaaagatagcaatggaaaagatcgtgaactgaccaagagattgagtgtcgacagttacatgacttgtgcggttagagagtgctacgcctcttttaaaaatctcataaactttttggttgttggagaacgagaaggacaggtcataaacgaaatcttctccaggattgatgaacatatagagaaagaaacactaataaaggacttgaacttgagtgctcttcccgatctgtatggtcaatttgttcgactaattgaatatctgatggaaaacagagaggaggacaaggaccaaattgttattgtcttgctgaacatgttagaagtggtgacaagagacataatggacgaagaggtcccaagcatgctagagtcaactcacaatggaacttatgtcaagtacgacgtaatgactcctcttcatcaacagcgcaaatatttcagccaacttcgattcccagtgtactctcagacagaagcctggaaagaaaaaatcaagaggcttcatcttttacttactgtcaaagagtcggctatggatgtgccatccaacttggaagctcgaaggcgacttacattcttttcaaattcattattcatggaaatgcctgatgcccccaaaatccgcaacatgctttccttttcggtcctaacaccatactattcagaggatgttctattctccatttttggtttggagaagcaaaatgaagatggagtctctatactcttttacttgcagaagatctttccagatgagtggacaaactttttggaacgcgtgaaatgtggcagcgaagaagaactcagagcaagagaagagttggaagaggaacttcgtctgtgggcatcttacagaggccaaacactgaccaaaactgtgcgaggcatgatgtattaccgaaaggctttggagctccaggccttccttgatatggcaaaggatgaagaattaatgaaagggtacaaggctctcgagttaactagtgaagacgcatcgaagagtggaacgtcgctctgggctcagtgtcaagcacttgctgacatgaaatttacctttgtggtttcatgccaacaatacagtgttcagaagagatccggtgaccaacgtgcgaaggacatattgaggcttatgactacgtacccgtctctacgtgttgcttatattgacgaggttgagcaaacacataaagaaagctataaaggggcagacgaaaaaatttactactcagcccttgtcaaagctgctccgcagaccaaatctatggattcttctgaatctgtgcaaacactagaccaggtcatataccggattaagctaccaggacctgcaatactaggagaggggaagccagagaatcagaaccattctatcatttttactcgcggagaagggttacagacaatagacatgaaccaggacaattacatggaggaagctttcaaaatgaggaacttgcttcaagaatttcttgttaagcatggaggcgtaagaacccctacaatacttggacttagagagcatattttcacgggaagtgtttcttctcttgcatggtttatgtcgaatcaggaaaacagctttgttactattgggcagagggtgctagctagccccttgaaggtacgattccattacggtcatccagatgtttttgatcgactgtttcaccttaccagaggtggtgtctgcaaagcttctaaagttatcaatctaagtgaagacatatttgctggtttcaactctactcttcgtgaaggcaatgtgactcatcatgaatacatacaagttggtaaagggagagatgtaggactcaaccagatttcaatgtttgaggcaaagatcgctaacggaaatggggagcaaactctaagccgtgacctatataggctggggcaccgatttgatttcttccgcatgctttcttgttatttcactacaattgggttctacttcagtactatgttaaccgtgcttacggtctatgtatttctatatggacggctgtatctcgttcttagtggtcttgaagaaggattgagcaaccagaaagcttttcgatccaacatgcctcttcaagctgcacttgcttctcaatcatttgtgcagattggtttcttgatggccttacctatgatgatggagataggtcttgagaggggattccataacgccctaattgattttgtactgatgcagttacaactcgcttccgtgtttttcacgttccaactggggacaaaaactcattactatggtcgaacattgtttcatggcggcgcagaatacagaggcactgggcgtggttttgtggtgttccatgccaaatttgctgaaaactacagattctactcgcgcagtcattttgtgaagggtattgagctgatgatactcctgctagtgtatcagatatttggccatgcctatagaggagttgttacatatattctgatcactgtttcgatatggttcatggtggtgacttggctctttgctcctttcctgttcaatccctctggtttcgagtggcaaaagatcgtagatgattggacagattggaataaatggatatataaccgagggggaattggtgttcctccagaaaagagttgggagtcttggtgggagaaggaaataggacatcttcgacactcgggaaaacggggtatcatcctcgagattgttttggctttacgcttcttcatctttcagtacggactggtttatcaactcagcacctttaaacaggaaaatcaaagtttgtggatttatggagcttcatggttcgtgatcttattcattttacttattgtaaagggtctgggtgtgggaagacaacggttcagcacaaacttccagcttctcttcaggatcatcaagggttttgtgttcctcacatttcttggacttctcattactttcttagctcttcgttttttaacacccaaggacatcttcctttgtatgctcgctttcatgccaaccggttggggaatgttactcattgcacaagcgtgtaagcctctgattcaacggctaggattctggtcatcggttaggacgctggctcgaggctatgagattctcatgggtttacttttgttcactccggtagcgttcctggcttggttcccgttcgtgtctgagtttcagacaagaatgctctttaaccaagcatttagcagaggattgcagatttcacgtattcttggtggtcagagaaaagaccgctcttccaagaacaaggagtgaaacaaaaatcatataagcagagaacagttacacatgtatatagtttaatactattgaagacaattatgcctcttttactacgttcttacaaagtaatctatggttctttaggagttgtgtattccggattttgattttgtttcggttcggcttacttggttct

SEQ ID NO: 179 - DNA, 5931 bp, Arabidopsis thaliana
atgtctcacgaaatcgtccccgttgatcccattgatgttcctagcacgagttactcacggccaattctgggtcctcgtgaagattcgccggaacgtgctaccgagttcacgagatccctaacttttcgggaacatgtgtcgtcggagccttttgatagcgagaggcttccagcgacattagcttccgagattcagaggtttcttcgtattgctaacttggttgagtctgaggaacctcgaattgcttatctatgccgatttcatgctttcgagatagcccaccacatggatagaaactctaccggaagaggtgtacggcagttcaaaacttctcttcttcaaaggcttgaactggatgaagagttcactgtgagaagaagaaaggagaagagtgatgttcgggaactcaaacgtgtttatcatgcttacaaggaatatattatcagacatggtgcagctttcaatttggataacagtcagcgagagaagttgattaacgcacgcagaattgcttctgttttgtatgaagttctcaagacagtcacaagtggcgctggcccgcaggccattgcggatagagaaagtattcgagcaaaatctgaattttatgtgccgtataacattcttcctctcgataaaggaggggtacaccaagcaattatgcatctgcctgagattaaagctgctgttgcaattgtacgtaacactcgcgggttgcctcctccagaggaatttcagagacaccagccttttctggatttatttgaatttctgcagtatgcctttgggttccagaatggaaatgttgccaatcagagagagcatctgattctactactcagtaacaccattatacggcaaccacagaagcagtcttcagctccaaagtctggtgatgaggcagtagatgcattgatgaagaagttttttaagaactacacgaactggtgcaaatttcttgggagaaaaaataacattaggttgccctatgtgaaacaggaagccctacaatataaaacattgtatataggactctaccttctcatatggggagaggcgtcgaacttgaggttcatgccagagtgcctgtgttatattttccaccacatggcatatgaattgcatggagttttaaccggtgcagttagtatgataactggggagaaggttgctccagcatatggtggaggacacgaatctttccttgcggatgtagttactcccatatacatggttgtccaaaaggaagctgagaagaataagaatggaactgctgatcattctatgtggagaaactacgatgatctgaacgagttcttctggtctcttgaatgcttcgaaataggttggccaatgcgtcccgagcacgattttttctgtgtagaatcatcagaaaccagtaaaccagggagatggcgaggaatgcttagatttcgcaagcagacaaagaaaacggatgaagaaatagaggatgacgaagaacttggggttctcagtgaggaacaacctaaaccaacctcaagatggctggggaagacaaattttgtagagactcgttccttttggcagatattccggagctttgacagaatgtggagtttctttgttttgtccctacaggcattgataattatggcttgtcatgatgtgggatctccactccaagtgtttaatgctaatatattcgaagacgtcatgagcattttcattacctcagcaattctaaagcttataaaaggtattcttgacataatcttcaagtggaaagcaagaaacacaatgccgatcaatgaaaagaagaagcggttggtgaagttgggctttgctgcgatgtggactattattctaccagtgctgtattctcattcaagaaggaaatacatttgttatttcacaaattacaaaacctggcttggtgaatggtgtttttctccatacatggtggcagtcacgatatacctgacaggaagtgcaattgagttggtcttgtttttcgttcctgccatcagcaaatacattgagacctccaatcatggcatctttaaaactttgtcttggtggggacagcctaggttatatgttgggcgaggaatgcaagaaactcaggtgtcacaattcaaatacactttcttctggattctggttctcctgaccaagtttgctttcagctatgcatttgagataaagcctctaatagaacctacacgactgataatgaaagttggtgtgcggaattatgaatggcatgaaattttcccagaagtgaagagtaatgctgctgcaattgttgcagtatgggcgccaataatggtggtctatttcatggatacacaaatatggtattcagtttactgtacgatctttggtggactgtatggtgttctgcaccaccttggtgagattcgaactttaggcatgttgagaggccggtttcatactttaccttcagctttcaatgcatcccttattccacactcaacaaaagatgagaaaaggagaaaacaaagaggttttttccccttcaatttaggcagggggtctgatggccagaaaaatagtatggccaagtttgtcttggtctggaaccaagtcattaacagtttcagaacagaagatctgataagtaacaaggaattagatttgatgacgatgccgctgtcatcggaggtattatcaggaatcatccgttggcccattttcctccttgcaaataagttttcaacagctctgagcattgcaaaagattttgtcgggaaggatgaggttctctatcgaaggattcggaaagacgagtacatgtactacgcagtaaaagagtgctatgaatctttgaagtacattcttcagattcttgttgttggtgatcttgagaaaaagattatatctggtataataaacgagatagaggaaagcatcagacagtcaagtttgcttgaagaatttaagatggctgagctcccagcgttgcatgacaaatgtattgagctggttcaactcctggttgagggaagtgccgagcaactccaggttgagaaaagcgaagaactgcatggtaaacttgtaaaggctcttcaggatatctttgagctagtaacaaatgatatgatggtacatggtgacagaattctggatttgctccagtctcgggaggggtcaggagaagacacaggtatttttatgagggttatagaaccacagttgtttgaatcctacggagaatggagatgcattcattttccgctgccagatagtgcttcattgagtgaacagatccagcgttttctgttattgttaactgtcaaagatagtgcaatggacataccagagaacttagatgctcggcggcgcctatctttctttgctacttcgcttttcatggatatgcccgatgctccgaaagtacgcaatatgatgtcattcagtgttttgacaccgcattatcaggaggatattaactattcaacgaacgaactacattccaccaagtctagtgtgtcaatcatcttttatatgcagaagatttttccagatgagtggaaaaactttcttgagcgaatgggatgtgataatttagacgccttaaagaaagagggtaaagaagaagagcttcgaaactgggcatcatttcgtggacaaacattgagtagaacagttcgtggtatgatgtattgccgagaagctctgaaattgcaagccttccttgacatggcagatgacgaggatattcttgaaggatacaaggacgtggaacgaagtaacagacctttagccgcacaacttgatgcattggcagatatgaaattcacgtatgttgtttcttgccaaatgtttggagcccaaaaatcatctggggatcctcacgcgcaggatatacttgacctgatgataaagtatccatctctccgtgttgcatacgttgaggagagggaagaaatcgtgttggatgttccaaagaaggtttactactctatattggtaaaagctgttaacggtttcgatcaggaaatttaccgtgtcaaacttcctggaccacctaacattggagagggaaagcctgagaatcaaaatcacgccatagttttcactcgaggtgaagcacttcagacgatcgacatgaaccaagatcactacctggaagaggctttcaaaatgagaaatctccttcaagaatttcttcgaaaccgtggaagaagacctccaacaattcttggtttaagggaacacatattcaccggaagtgtttcttctctagcatggttcatgtcatatcaagaaaccagttttgtcacaatcggtcaaaggcttcttgctaatcctctcagagtccggtttcactatgggcatccagatgtcttcgacagaatatttcacataacaaggggtggcatcagtaaatcatcgagaactattaacttaagcgaggacgttttcgcaggttataatactaccttacgacgtggatgcataacctacaatgagtacctccaagttggaaaaggtcgtgatgttggcctcaatcaaatctcaaagtttgaggccaaggtggctaacggaaacagtgaacagactattagccgtgacatataccgtttaggacaacgttttgatttcttcagaatgttgtcttgttatttcacaaccattggattctacttcagtagcttgatttccgtgatcgggatttatatttatctctatggtcaactctacctcgtactcagtgggttgcagaagacgcttattcttgaggccaaggtgaaaaacataaaatcattggaaacagcccttgcctctcaatcatttatccagctaggtctcttgaccggtctaccaatggtgatggagattgggttggagaaaggatttcttatagcctttcaagatttcatactcatgcagctacagcttgctgcattcttcttcactttctctctaggaactaaaacgcattactttggcagaacaattctccatggaggtgccaaatacagacccacagggcgtaaagtagtggtgttccatgccaacttcagtgaaaattacagattatattctcgaagccatttcatcaaaggttttgagctcatgattcttctggtcgtctacgagttgttcaagcatacatctcaaagcaacatggcttactcattcatcactttctcagtgtggttcatgtcttttacttggttatgcgccccgtttctcttcaacccttcaggctttacctgggaaataatagtcggtgactggagagactggaacaggtggatcaaagagcaaggtggaatagggattcagcaagacaagagctggcaatcttggtggaacgacgagcaagcccatctacgtggctctggtgttggagctcgctgtttggagataattttgtccctcaggttctttgtgtatcagtatggtttggtatatcaccttgacattacccaaagcaacacaaatatcatagtctacgcgctttcttgggtcgtgattctcgccacattcttcacagtcaaggcagtagacctaggaagacaactcttcagcacaagaaagcatctcgtgtttcggttcttcaaagtcttcgtcttcgtgagcatacttacaatcataatcactctagcaaacatctgtcacctctctgtcaaggaccttctagtctcttgcttagctttcttgcccactggttggggtctgattctgattgcacaagcggttaggccaaagatagaaggaacgagcttatgggagttcacacaggttcttgctcgagcttatgattatggaatgggcgttgttctgtttgcaccaatggctatcttagcatggcttcctattatttctgcgtttcagactcgttttctattcaacgaagcttttaacagaagacttcaaattcaacctattcttgcagggaagaagaagaatcgatga

SEQ ID NO: 180 - DNA, 5766 bp, Arabidopsis thaliana
atggaagctagttcgagtggaacggcggagttgccgcggtctctttctcggagagctccgtcgcgtgcgactactatgatgattgatagaccaaacgaagatgctagtgctatggatagcgagcttgttccttcctctctcgcttctattgccccgattcttcgcgttgctaatgaaattgagaaggacaatcctcgagtggcttatctatgccggtttcatgcgtttgagaaagctcataggatggatgctacatccagtggacgaggtgttcgtcagtttaagacctatctgttacatagacttgagaaggaagaagaggaaaccaagcctcagctggcgaaaaacgatcctagagaaattcaggcatattaccagaacttctatgagaaatatattaaagaaggagaaacatcaagaaaaccggaggaaatggcaaggctttaccaaattgcatcggtattgtacgatgtactgaagactgtagtaccttcacctaaagtggattacgagacccgtagatatgccgaagaagttgaaaggaaaagggatagatatgagcactacaacattcttcctttatatgctgtagggactaaaccagcaattgtggaacttcctgaggtcaaggctgcattcagtgctgtccgtaatgtgcgcaatcttccacgacgaagaattcatttgccatctaatacccctaatgaaatgcgtaaggctagaaccaaacttaatgacatacttgaatggcttgcttctgagttcgggtttcagagagggaacgtggcaaatcagagggagcacataatactgcttcttgctaatgctgacattagaaagagaaatgatgaagaatatgatgagttgaaacctagcaccgtcactgagttgatggacaaaacttttaaaagttattactcatggtgtaaatatttgcactctacgtctaatctcaagtttccagatgattgtgataaacagcagctgcagcttatctatatttccctgtaccttttaatatggggtgaagcctcgaatgttagatttatgcccgaatgtatctgctatattttccataatatggcaaatgacgtctatggaattctgtttagcaatgttgaagctgttagtggtgagacatatgaaacagaagaagttattgatgaagaatcatttctgagaactgttataactccaatctatcaggtcatacgcaacgaagccaaaaggaacaagggaggtacagcaagccattcgcaatggagaaattacgatgatttgaatgaatacttttggtctaagaaatgcttcaagataggatggcctcttgaccttaaagcagactttttcctaaactctgacgagataaccccacaggacgagaggctgaatcaagtcacttatgggaaaagcaagcctaaaaccaactttgttgaagtccgcacattctggaacctcttcagagattttgatcgaatgtggatatttcttgtcatggcttttcaggctatggtaatagttggatggcatggttctgggtcactaggtgacatatttgacaaggatgtattcaaaacggtgttaactatttttattacttcggcgtatctgactcttttacaagctgcactggatattatcctaaatttcaatgcctggaagaatttcaagttttcccagatattgcggtaccttttgaaattcgcagtagcatttatgtgggcggtactgcttccaattgcttactcgaagtctgttcaacgcccaactggagttgtaaagttcttcagtacttggactggggattggaaggatcagtccttttatacgtacgctgtttcattttatgtgttaccaaacatattggcagctctgttattcctcgttccaccattccggagagccatggagtgttcagacatgcgacctatcaaagttataatgtggtgggctcagccaaaactatacgttggaagaggtatgcatgaggacatgttctctctcttcaagtataccaccttctggatcatgctactgatcagcaagcttgctttcaactattatgtggagatactaccccttattacgccaacaaagatgatcatgaatctgcacattggtcactaccagtggcatgaattttttccccatgcaactaacaatattggagtggttattgctatatgggctccaattgtactggtttacttgatggatactcaaatatggtacgccattttttccactctgtttggaggcatacatggggccttcagtcatctgggagaaatacggactcttgggatgttgcgatctagatttgagtcaataccaattgccttcagccgcaccctcatgccatccgaagatgcaaaaagaaaacatgcggatgactatgtggaccagaaaaacatcactaatttctcccaggtgtggaacgagttcatttactctatgagaagcgaggataagatcagtgacagagatagggatttgctgcttgtaccatcttcgtcgggtgatgtgtctgtcatccagtggccacctttcttgcttgctagtaagattcctattgctgtggacatggcaaaagatttcaagggaaaagaggatgctgaactatttagaaagattaagagtgatagctacatgtattatgctgttattgagagttatgagacattgaagaaaataatttacgctcttctggaagatgaagcagatagaagggtcatgaatcaggtatttttagaagtggacatgagcatgcagcaacagagattcatatatgaattccgcatgagtggattaccgctccttagtgataagctggagaagtttctaagtatattgttaagtgactatgaagaccagggtacatacaagtctcagttaattaatgtcttccaggatgttatcgaaattatcactcaagatctcttggttaatgggcatgaaattcttgaaagggctcgtgttcattctcctgacatcaaaaatgagaaaaaggaacagaggtttgagaaaattaatatccacctagtacgggatagatgttggcgggaaaaggttattcggcttcatttgctcttatcggtcaaagaatctgcaataaatgttcctcaaaacttggaagcccgccgacgtatcacattctttgctaattctctgtttatgaatatgcctagtgctccaagaatacgagatatgctatctttcagtgttttaactccttactacaaagaagatgtgctgtattcagaggaagaccttaacaaggaaaatgaagatgggatctcaattctgttttatctacaaaagatttatcctgatgagtggaccaattatttggatcgcttaaaggatcctaagcttcctgagaaagacaagtcagagttccttcgagagtgggtatcttacagaggtcagacgttagccagaacagttaggggtatgatgtactatagacaggctctggagcttcaatgctaccaggaagttgcaggggaacaagccgagtttagtgtctttcgggccatggcgtccaacgatgaaaatcagaaggctttcctggaacgtgccagagctcttgcagatctgaagttcacttatgttgtttcttgtcaggtctacggaaatcagaaaaagtccggtgatatccacaaccgcagctgctacacgaatattctgcagctcatgctaaaatatccatcattgcgggttgcttatgtagatgagagggaggagacagcagatgcaaaatctccgaaggtcttttactctgtacttctaaaaggaggtgacaagtttgatgaggaaatttaccgcatcaagcttcctggtcctccagctgagattggtgaaggaaagcctgaaaatcaaaatcatgctatcatatttacacgtggtgaagcactacaaactatagatatgaatcaagacaattactttgaagaagctttcaaactaagaaatgtattggaggaattcaataaggagcgtgttggtagacgcaagccaacaatattgggtctccgagaacatatatttactggaagtgtttcgtcattagcttggttcatgtccaatcaggagagtagttttgtgacaattggccaaagaattttggcaaaccctctgagggtccgttttcattatggtcatcctgacatatttgacagaatctttcacataacaaggggcggtgtgagcaaggcttcgaaagtaataaatttgagtgaggatattttcggaggcttcaattcaactctccgtggaggatatgttacacatcacgagtatatccaagttggaaagggacgggacgtggggttgaacccaatctctatttttgaagcaaaagtagcaaatggaaacggggagcaaacgctaagccgtgatgtttaccgtttggggcatcggtttgacttttacaggatgctctcattctattttacgaccattggattctattttagtagcatgctcaccgttcttactgtatatgcattcctgtatggacggatgtacatggttatgagcggattggagaaagagattttgagactcgcaagcccgaatcagcttgaggctcttgagcaggctctggctacacagtcaatatttcagcttggtttcttgatggtgttaccgatggtaatggagattggcttggaacacggttttcgctctgctattgtcgattttttcataatgcagctgcagctagcctcggtattctttacattccagcttgggacaaagtcacattattacgggagaacaattttacatggtggttccaaatatagaccgacgggccgtgggtttgttgttttccatgccaagtttgcggagaactacaggttgtattcgagaagtcactttgtgaagggactagagctgcttttattgctagttgtttatcaaatctatgggcattcataccggagttcaaacctttatctgtatatcacagtctcgatgtggtttatggttggttcttggttgtttgcaccatttatattcaatccttcggggtttgagtggcaaaagacagttgacgattggactgattggaaacgatggcttggagatcggggtggtataggcatcccggttgaaaaaagctgggaatcgtggtggaacgtagagcaagaacacctcaaacatacaagtattagagggaggattctggaaatcacacttgctctccgctttttcatttatcagtacggaattgtttaccagctcaatatctctcagcgcagcaagagctttttggtttatggactctcttgggtggtcttgctcacatcattacttgttctaaagatggtatctatgggcagacgaagatttggaacagattttcagctaatgttcaggattcttaaagcacttctcttcctcggctttttgtcagtcatgacaatattatttgtggtgttcaaactcacactcaccgatctctctgcttcagttcttgcttttcttccaaccgggtgggcgattcttctgattgggcaagtactgaggtcaccgatcaaagctttaggggtttgggactcggtgaaagagctaggaagagcgtatgagaatatcatgggacttgtaatctttgcaccaatcgctgttctgtcttggtttcccattgtctccgagtttcaagctcgtctgcttttcaatcaagcttttagcagaggccttcaaatctctatgattctcgctggtcggaaagacaaagcaacttcttcgcacaagtaa

SEQ ID NO: 181 - DNA, 5835 bp, Arabidopsis thaliana
agaaactgaaacgcggaaaggaggcaaaatcttctcgtcgtcgttgtcgccgtcttcagagctacaaacgaaaaaactcgcttccgtttcgatttctccattgttattgtttcttcagtgaagcttttttcttcgagaaatttctaagatctaccacatgctactatgagcctccgccaccgcaccgtcccgccgcaaaccggacggccgttggcggcggaagctgtcggaatcgaagaggagccgtacaatatcattcccgttaacaatctcctcgccgaccatccttcactccgttttcccgaggttcgtgccgccgctgctgctcttaaaaccgttggagaccttcgtcgtccgccgtatgttcaatggcgttctcactacgatctcctcgactggctcgccttgttcttcggtttccagaaagataacgttcgtaaccagcgtgagcatatggtgcttcatctcgcaaatgctcagatgcgtctctctccgccgccggataatattgattctctcgattccgcggttgttcgtcggtttcgtcggaaacttctcgctaactactctagctggtgttcgtatttggggaaaaaatcaaatatctggatctcagatcggaaccctgattcgagacgagagcttctctatgttggactctatcttctcatttggggagaggctgcgaatcttcggttcatgcctgaatgtatctgttacatcttccataacatggcctctgagctcaacaaaatcttagaggattgcctcgatgagaacaccggccaaccttacttgccttctctctcaggcgaaaacgctttcttaaccggcgtcgttaaacctatttacgatactatccaagctgagattgatgagagcaagaacggtacagttgcgcattgtaagtggaggaactacgacgatatcaatgagtacttctggactgatcggtgtttcagcaaattgaaatggccgcttgatttgggaagcaatttctttaagagtagaggcaaaagtgtagggaaaactggtttcgtggagcgcaggacgttcttctacctttacaggagttttgatcgactttgggtgatgctagctttgttccttcaagccgccattatagtagcttgggaggaaaagccagatacctcgtcggtaacaaggcagctgtggaatgctctgaaggcaagagatgttcaggtgagactattgaccgtgttcttgacatggagtggtatgcgactcttgcaggctgtgctggacgcggcttcacaatatcccctcgtttccagagagaccaaaaggcattttttcagaatgctgatgaaggttatagctgccgcagtttggattgtagctttcactgtcctctacactaacatctggaagcagaagaggcaagacaggcagtggtccaatgccgcgacgactaagatataccaattcctttacgctgtgggggccttcttggtgcccgaaatcctggctttggctttgtttattatcccatggatgagaaacttcctggaagagaccaattggaaaatattctttgctctaacttggtggtttcaaggcaaaagctttgtgggtcgaggtttgagagagggtttagtggacaacatcaagtactcgactttctggatctttgtcctagctacaaagtttacatttagttacttcctgcaggttaagccaatgattaaaccctcaaagctgctatggaacttaaaggatgtcgattatgagtggcatcagttttatggagacagcaataggttttctgtcgcattgttatggttgccagttgtgttgatatatctgatggatatccaaatttggtacgcaatctattcttcgattgttggtgctgttgttgggctgtttgatcatctgggggagatcagggacatgggacagctgaggctaaggtttcaattctttgctagtgctattcaattcaacctaatgcctgaggaacaactcctgaatgctagaggctttggtaacaagttcaaggacggcattcatagattgaagctaaggtatggatttgggaggccgtttaagaaacttgagtcgaatcaggtcgaggccaacaagtttgcgttgatctggaacgaaatcatcttagctttcagagaagaggatatagtttctgatcgtgaagtagagctactggagctgccaaagaattcctgggatgtgacggttattcgctggccgtgtttcttgttgtgcaatgagcttttgcttgcactgagccaggccagagagctgatagacgcacctgataaatggctgtggcacaaaatatgcaagaatgaatacaggcgttgtgctgtagttgaggcatatgacagcatcaaacatctattgctctcaatcatcaaagttgacactgaagaacattcgataattacggtcttctttcagataattaatcagtccattcagtcagagcagttcaccaagacctttagagtggacctgctgccaaaaatttatgaaacactgcagaaattggttgggctggtaaatgatgaggaaacagatagtgggcgggtggtgaatgttctgcagtctctttatgagattgcaactcgacagttctttatagagaagaagacaactgaacagctatctaatgaaggtttaactcctcgagacccagcctcaaagttgctgtttcaaaatgctattaggcttcctgatgcaagcaatgaagacttctaccggcaggttaggcgtttacacacgattctcacctctagggactctatgcacagcgtccctgtgaatctagaggcgagacggcggattgctttcttcagtaattcgcttttcatgaacatgcctcatgcccctcaggttgagaaaatgatggcgttcagtgttctgactccatattacagtgaggaagttgtatacagcaaagaacagctccgaaatgagactgaggatgggatttccaccctatactacctgcagacaatttatgctgatgaatggaaaaatttcaaggaacggatgcatagggaaggaatcaagacagatagtgagttgtggacaaccaagctgagagacctcaggctttgggcttcctacagaggtcagacattggcacgtacagttcgtgggatgatgtactactaccgggctcttaagatgctcgcttttcttgactctgcgtctgaaatggacattcgggagggtgctcaggagcttggttcagtgaggaatttgcagggagaactgggtggtcaatctgatgggtttgtctctgaaaacgaccgatcttccttaagcagagcaagtagttccgtgagtacgctgtataaaggccatgagtatgggactgcattgatgaaattcacatatgttgtggcgtgtcagatctacgggtctcaaaaagcaaagaaagagcctcaggcagaggaaattctgtatctgatgaagcagaacgaagctctccgtattgcatatgtggatgaggtgcctgcgggaagaggagagactgattattactccgttctggtgaaatacgatcaccagttggagaaggaagtggaaatattccgtgtgaagctacctggtccagtgaagctgggcgagggaaagccagagaaccagaatcatgcaatgatctttacccgtggtgatgctgttcagaccattgatatgaaccaagacagttattttgaggaagctctcaagatgagaaatttgctccaggagtacaaccattatcatggtatcagaaaaccaactattcttggtgtcagggagcatatcttcacgggatcagtctcgtcactggcgtggttcatgtctgctcaggagacaagttttgtcactcttggtcagcgtgttcttgcaaacccactgaaggtcagaatgcattatggccaccctgatgtatttgacagattctggttcttgagtcgaggcggcatcagtaaggcttccagagttataaatatcagtgaggacatctttgccgggtttaactgcacgttaagggggggaaacgtcacccaccacgagtacattcaggtcgggaagggacgggatgttggattgaatcagatatcaatgtttgaggctaaggtagccagtgggaacggagagcaggttctcagccgagatgtgtaccggctcgggcacaggcttgatttcttcagaatgttatcatttttctacacaactgtagggtttttcttcaacacaatgatggtcattcttactgtttacgctttcctctggggacgggtttatctggctctcagcggggttgagaagtccgctctagcagacagtacggacaccaacgccgcgcttggggtgatcctgaaccagcagttcatcattcagctcggtctgttcactgccctgccaatgattgttgaatggtctctcgaggagggtttccttctagcgatatggaatttcattcgaatgcagattcagctttcagctgtcttctacacattctcaatggggaccagagctcactatttcggtcgaactattctccatggtggggccaagtatagagccactggacgtggatttgttgtcgagcacaagggattcactgagaactaccgactgtatgcacgcagtcactttgtgaaggccatcgagcttgggctgatcctcatagtctacgcttcgcacagtccgattgccaaagactcgttgatttacatagccatgactatcaccagctggtttcttgtgatttcatggataatggccccatttgtgtttaacccatcaggattcgactggcttaagacagtctatgactttgaagacttcatgaactggatctggtaccaaggcagaatctcaacgaaatctgaacaaagctgggaaaaatggtggtacgaggaacaggaccacctgagaaacaccgggaaggcaggattatttgtggagatcatcttggtcctccggtttttcttcttccagtatgggattgtataccagcttaaaattgcaaacggatccaccagcctttttgtctacttgttctcatggatatacatctttgctatatttgtgctcttcctagtcatccaatacgcccgtgacaagtactcggcaaaagctcacatacggtacaggcttgtccaattcctcctgatcgtgcttgctatactggtgattgttgctttgctcgagttcacgcatttcagcttcatcgatatcttcacaagccttcttgcattcatcccaactggctggggaattctgctgatcgcacagactcaaaggaagtggctgaagaattacactattttctggaatgctgttgtctctgttgctcgcatgtatgacatattgtttgggatactcataatggttccagtagcgttcttgtcatggatgcctggattccagtcaatgcaaacgaggatattattcaatgaagcttttagcagaggacttcgcatcatgcagattgtcactgggaagaaatcaaaaggcgatgtctaagtttaaaaaacggtcttaagaagtaaatggtagttcaaatcctattggtatgtggcgaaggaatcagttggaggtttttggagagtttggttggatgaggaatcgggaagttggtttgattcggttagatgggtttagggagatatttgattgtcagtgtgtgtggagggaactctgattcttgtatggtttttgttctaaaggtacagcaatttgtgtagtgaggctttgtgtatttgttctccttctctcattatagagctttagagcatttttagtttatattcagattgttatctaatgtcatctcgcagagcttttgttcac

SEQ ID NO: 182 - DNA, 5827 bp, Arabidopsis thaliana
atgagaaggcagcggccatcggtagccaccgcgcgtgatgcgccgtcactagaggtatacaatatcattccgattcatgatttcttaacggaacatccgtcgctgcgttatccggaggttagagcggcggcggcggcgcttagaatagtcggagatcttccgaaacctccgtttgctgatttcacacctcgcatggacttgatggactggcttggtcttctctttggttttcaaatcgataacgttcggaatcagcgagagaatctcgttcttcacttagctaactctcaaatgcggctgcaacctccgccacgtcatcccgacggtctcgatccgactgttctccggagatttcggaagaagctgcttcgtaattatacaaattggtgctcgtttctcggagtgaggtgccacgtcaccagccctatccaaagccgtcaccaaacgaacgccgttttgaatctccgccgtgagcttctctatgttgctctctatctattgatttggggagaatctgcgaatcttcgttttatgcctgagtgtctgtgttacatttttcatcatatggctatggaacttaataaagtcctcgccggagagtttgatgatatgactggaatgccttactggccttccttctcaggtgattgtgctttcctcaagagtgtggtcatgcctatttacaagacggttaagacggaggttgagagtagcaacaatgggacgaagccacactctgcttggagaaattacgacgacatcaatgagtatttctggagtaagagagccttgaagagccttaaatggcctcttgactacaccagtaatttctttgatactacacctaaaagcagtagagtggggaagacaggatttgtggagcagagatcattttggaatgtgtatcgaagctttgatcggttatggattttattgcttctgtacttgcaggcagctattattgttgctactagtgatgttaagtttccttggcaagaccgtgatgtagaggttgctttgttgactgttttcatctcctgggcgggattgaggttgctccaatctgtgctcgatgctagtactcagtacagtttggtgagcagagaaacttattggcttttcatcagattgactttgaagttcgtggtggctgtggcatggacagttttgttttcggtcttctatgcaaggatttggagccagaaaaataaggatggtgtatggtctcgggctgcaaacgagagggttgtcacgtttctcaaggttgtgttcgtttatgttatacctgagttattagctcttgtactctttattgttccttgtataaggaactgggttgaggagttgaatcttggagttgtgtactttctgacatggtggttctatagcaagacttttgttggtcgtgggatgagggaaggtttagtggacaatgttaagtatacactcttttggattattgtattggccactaaattcatatttagttacttcttacaaattaggcctctaattgctccgaccagggcactactgaaccttaaggatgcgacgtacaattggcatgagttttttggtagcactcacaggatagcagtagggatgctctggctccctgttattttggtttacctgatggatttgcaaatttggtactcgatctactcatcccttgtaggtgcaacaattggtctgttttctcacttgggggagatccggaacattgatcagttgagacttagatttcagtttttctcaagtgctatgcagtttaatcttaaacctgaagagcatcttctgagccctaaagcaacaatgcttaagaaggctcgtgatgctattcaccggctgaaattgcgatatggaattggtcagcctttcaacaagatcgaatccagtcaggttgaagcaacttggtttgccctgatttggaatgagataatcctcacatttagggaggaagaccttatcagtgatagggaggttgagctactcgagttgccgcctaattgttggaatattcgggttatccgttggccgtgtttcctcctttgcaatgagctcctacttgcgctaagtcaggcaaacgagctctgtgacgctcctgatcactggctttggtcaaaaatctgtagcagtgagtacaggcgttgtgctgttatggaagcttttgatagcatcaaatttgtgattcttaaaattgttaaaaatggcacagaagaagaatccatactgaacaggttgtttatggagattgatgaaaatgtggaaaacgaaaagataactgaagtatataagctgacagtactactccggattcatgagaagctaatatcacttcttgagcgtctgatggacccagaaaagaaagtattcaggatcgtgaatatactgcaagctctgtatgaactttgtgcatgggaattcccaaaaactaggaggagcactccgcagttaaggcagcttggcttggcgcccattagtttggaagcagatactgaattgctgtttgtcaatgccattaatctccctcctcttgatgatgttgtcttttataggcagatacggcgggtccatacaattcttacttctagagatccaatgcataatgtgcccaagaatattgaggccagagagcgtcttgctttctttagcaactctctctttatgactatgccccaggctcccagtgtagaaaagatgatggctttcagcgtgttgactccttactatgacgaagaagtgatgtatcgacaagaaatgctccgagctgagaatgaggatggaatttccaccctattctaccttcaaagaatttatgaagatgaatgggtgaattttctggagcggatgcgtagagagggagcagagaatgagaatgatatctggtcaaagaaggttagagatcttcgcctctgggcttcatataggggacaaacattgtccagaacagtgcgagggatgatgtattattatagtgccttgaagaaacttgcctttcttgattctgcttctgaaatggacatcaggatgggaactcagattgcccctgaggcacgccgttcgtactacacaaatgatggtggggataacacactgcaaccaacaccttctcaggaaattagcagaatggctagtggtataacccacttgcttaaagggtctgagtatgggagtgcaatgatgaaattcacatatgttgtggcatgccaagtttatgggcaacataaagcaagaggggaccatagagctgaggagattctgttcctgatgaagaatcatgacgcccttcgtattgcatatgttgatgaggttgacctgggaaggggtgaggtcgagtactattcagttcttgtgaaatttgatcaacaacttcagagagaggtggagatctatcgtatcagactgccaggccccttgaagcttggtgagggaaaaccagaaaaccaaaaccatgctctaatctttacacgaggagatgcgattcagaccattgatatgaatcaagataaccattttgaggaggctcttaagatgaggaacttgttggaatcattcaagacttactatggcattaggaagcctactattcttggagtccgtgagaaagttttcactggttcagtatcttcactcgcatggtttatgtccgctcaggaaacaagttttgtaaccttaggacagcgtgttcttgccaacccactgaaagtgaggatgcattatggtcatccggatgtatttgatcggttttggtttgtgcctcggggtggaattagcaaagcctcaagagttataaacatcagtgaggatatatttgctggattcaattgtactttaagaggtgggaacgttacacaccatgaatacattcaggtaggcaaaggaagggatgtgggtttgaatcagatctctatgtttgaagccaaggtagcgagtggtaacggtgagcaagcattgagcagagacgtttacaggttaggtcacaggctggacttctttagaatgctctctttcttctacacaacggttggctactatttcaacacaatgttgatagtatttactgtttatgcattcttgtggggtcggctttatctagcacttagtggtgttgagaaaatagcaaaggataggagtagcagcaatgaagctcttggtgcaatcttgaatcagcaatttattattcagctaggacttttcactgcacttccaatgattcttgaaaattctctcgagcgtgggtttcttccagcggtttgggacttcataacaatgcagctgcaacttgcatcgtttttctacactttctccatgggaactcgaacccattactttggccggactatactccatggtggagccaagtatcgtgccactggaagagggttcgtggtggagcataagaaatttgctgagaactacagattgtatgctcgaactcatttcattaaagctattgagctcgcgattattctgttggtatatgcggcttatagcccgttggctaagagttcgtttgtttacatactgatgacgatttcgagctggttccttattacatcttggattatttctccatttctgtttaacccttctggcttcgattggctcaaaacagtaaatgattttgatgatttcattgcatggctatggtctagaggcgggttgtttacgaaagcagatcagagttggtttacgtggtggaatgaggaacaagagcatctgaaaacaaccggagtgtggggaaaactgcttgagattatacttgatcttcggttcttctttttccagtacagtattgtgtaccatcttcgcattgcagagaatcgaaccagcattggtgtatacttaatttcttggggatgcatcatcgggattgttgcgatatacatcacaacaatctatgctcagaaaagatattctgtcaaggagcatataaaatatcgattcattcagttcttagtaattctccttacggttcttgtggtcgtgatgatgctgcagttcactaaacttacagtagttgatttgttgataagtctcttggcttttgttcccacaggctggggattgatttctatagctcaagtactgaaaccgtttctgttatcaacagtggtttgggacacagtaatctctgtggctcgcttttacgaccttttctttgggctgatagttatggctccagttgcattgctttcatggttgcccggttttcagaatatgcaaacacggattttgttcaatgaagcttttagcagagggttacagatttctatcattctcgctggcaaaaaatccacttgaagcaaatattggggttcttaaagtttttgaaatgagttggtctgagaaggttgggcgatatccttttctctagcaaaaaaagttttgcttgaagcagcttatggtagcctggtttaatatcatcctccaccgttttgtggcattgctccaggttaagcctggtttttcctcatggtggttagcattttggagttgattgtttgaccttggtttggcttgtttataaacatataagggttcttgatttgttgagagatggtaatatgagggagcttagaaaaatgacggtatgcttcacactgcaccagttgttttggtcgtgtacagatttgacccttttgcatttgttaggagactcttgcttttaacaactcttatgcacatagtttgcttgtggagacgatttttacgtgctcttagactcttcacactgcaaatgcgtgtccaaccgcatcatatcacttatgtaaacaacatttctcagaaaatggctcatttgagctctaattaatttcagatg

SEQ ID NO: 183 - DNA, 6160 bp, Arabidopsis thaliana
ctttgcgtacttagcagctaagtagcttaaaaagttgtggctcctttgctccgccattgttagggtttctggatctccgtttctctggaggctgaggaaaccttaaaacgatttaaaacctggaggttatagggtagacaaaatgtctgctacgagaggaggtcctgatcaagggccgtctcagcctcagcagcggcggattatacgaactcagactgctggtaatcttggagagtcattcgatagtgaagttgttccatcatctcttgttgagattgcccccattcttcgggttgctaatgaagttgaatctagtaatcctagggttgcgtatctctgtcggttttatgcatttgagaaagcacatagattggatcctacctccagtggaagaggtgttcggcagtttaagactgcacttctacagcgtcttgaaagagaacatgatccaacactgatgggcagggttaagaaaagtgatgcccgtgaaatgcaaagcttttatcaacactactataagaagtatattcaagctttgcacaatgctgctgataaggctgaccgtgcccagctgacaaaggcataccaaactgccaatgttttgtttgaggtgttgaaggctgttaatctgacacagtccattgaggttgaccgggagattctggaagctcaagataaggttgcagaaaagacacagttgtatgtcccctataatatcctacctctcgatcctgatagtgccaatcaagcgattatgagatatcctgagatccaagctgctgttcttgctctccgcaatactagaggtcttccttggccagaaggtcacaagaaaaagaaagatgaagacatgcttgattggcttcaagaaatgtttggatttcagaaagacaatgtggctaatcaaagggagcatctgatcttattacttgctaatgtgcatataagacaatttcctaagcctgatcagcagccaaagttagatgatcaagcattgacagaagtgatgaagaagcttttcaagaactataagaaatggtgcaaataccttggtcgaaagagtagtctttggttgccaactatacagcaggaaatgcagcagcgcaaactattgtatatggccctgtatcttctaatttggggtgaagcagcgaacttgagattcatgccagagtgtctctgctacatttatcatcatatggcatttgaactctatggtatgctggctgggaatgttagtcctatgactggggaaaatgtgaagccagcttatggaggcgaggaagatgcattcttgaggaaagttgtgactcctatttatgaagtgattcagatggaggctcaaagaagcaaaaaagggaagtctaagcactctcagtggaggaactacgatgatttgaatgaatacttttggtcagttgattgttttcggttaggttggccaatgcgagctgatgctgatttcttttgtctgcctgttgctgtacccaatacagaaaaggacggggataacagcaagcctattgtcgccagagatagatgggttggtaaagttaattttgttgagattcgttctttctggcatgtcttcagaagtttcgatcgaatgtggagcttctatattctgtgcctccaggccatgattattatggcctgggatggcggacaaccaagttcagtctttggagctgatgtattcaagaaagttctgagcgtgtttatcacagctgcaataatgaaacttggacaagctgttcttgatgtgatccttaatttcaaagctcatcaaagcatgacactacatgttaaactaagatacattctgaaagtgttctctgctgctgcctgggttattattctgcctgttacttacgcctacagctggaaagatcctccagcatttgccagaactatcaagagttggtttgggagtgctatgcactcaccttctctatttataatagcagtcgtttcctatttgtcacctaacatgctcgcgggtgtaatgtttcttttccctctgctacgacggtttcttgagaggtccaactacagaattgtaatgctaatgatgtggtggtctcagcccagactctacgttggcagaggaatgcacgagagcgcattttccctcttcaaatataccatgttctgggtgttgcttattgcaacaaagctggcattcagttactacattgagatcaggcctttagttgccccaacacaagccattatgaaggcccgtgtgacaaattttcagtggcatgagttctttcctcgtgccaaaaacaatattggtgtcgttatcgccctctgggcccccattattctggtatattttatggatagtcagatttggtatgctatattttccacattatttggaggtatctacggtgcattccgccgccttggagagattcggacactgggaatgctcagatcacggtttgaatcactgcctggagcttttaatgaccgcttaattccagatggaaagaaccagcaaaagaagaagggaataagggcaacgttatctcataactttacggaggataaggtacctgtgaacaaagagaaagaagctgcaagatttgcacagttgtggaacacaataattagtagttttagagaggaagatcttataagtgatagggagatggatctgttgcttgttccttattgggctgaccgtgatttggatctcatacagtggcctcccttcttattggctagcaagattccaatagcattagatatggcaaaagacagtaatgggaaggacagagagctcaagaagaggattgagagtgacacttacatgaaatgtgctgtccgtgaatgctatgcttcattcaagaatatcataaaatttgtggttcagggaaaccgtgaaaaagaggtgatagagatcatatttgcagaggttgacaaacatatagatacaggggatttgattcaagaatacaagatgagtgctcttcctagcctctatgatcactttgtcaagttgatcaaatatttgcttgacaataaggaggaagatagagatcacgttgtaattctcttccaagacatgctggaagttgtaacaagagacattatgatggaggattacaatatatcgagcttggtagattcaagtcatggtggcacttggcatgggggaatgatccctctcgaacaacaatatcagctgtttgcatcctcaggtgccattagatttcctattgaaccagtaacagaagcttggaaagagaagatcaaacggatatatcttttgttgactactaaagagtctgctatggatgtcccctctaacttggaagcaagaaggcggatctcattcttctcaaattcgttgttcatggacatgcctatggcacctaaagttcgcaacatgctatcattttctgttttgactccttattacactgaagaggtcctcttctccttgcgggacctggaaacaccaaatgaagatggtgtttcaatcctcttctacctacaaaagatttttccagatgaatggaacaattttcttgagcgggtgaagtgcttaagtgaagaggaacttaaggagtctgatgaattagaggaggaacttcgtttatgggcttcatatagagggcaaactttgactagaactgtaagaggaatgatgtactatcgaaaagccttggagcttcaggcattccttgacatggctatgcatgaagatttgatggaaggttacaaggctgtagaactaaattcagagaacaattcaagaggtgaaagatcactctgggcacagtgccaagctgttgctgacatgaagtttacatatgttgtatcatgtcaacaatatggtatccataaacgatccggtgatcctcgtgcgcaggatatattgaggcttatgacaagatacccttcactccgtgttgcatatattgatgaggtcgaagaaccagtgaaagacaagtcaaagaaagggaaccagaaagtgtattattctgtgttggtaaaggtgcctaagtcaactgatcattctaccctagcacaaaatctggaccaggttatctacaggattaggcttcctggacctgctattcttggagaaggaaagccagaaaaccaaaatcatgctatcattttttcccgtggagaaggtttacagacaatcgatatgaatcaggataattacatggaggaagcgttaaagatgaggaatttgcttcaagaatttcttacaaaacatgatggtgttagacatccatccattcttggacttagggaacatatatttactggatcagtttcatcccttgcttggttcatgtcaaatcaagagactagttttgttaccattggtcagagattattggcaaatccattgagggtgcgtttccattatggccatccagatgtttttgatagactgtttcatctaacaagaggtggtgttagcaaagcatccaaggtaatcaacctcagtgaagatatatttgcaggattcaattctacacttcgtgaaggaaatgttacccatcatgaatacatacaagttggtaaaggaagagatgttggtctaaatcagatctctatgtttgaggccaagattgctaacggcaatggagagcagacattaagtcgggatatttacaggcttggacaccgttttgactttttccgaatgatgtcatgttacttcaccactgttggcttttatttcagcaccctgattactgttctcactgtctacatcttcctttatggacgtctctatcttgttttgagtgggctcgaacaaggtttaagtacgcagaaaggcatccgagacaatacacctttgcaaatagctctggcttcacagtcttttgtccagattggtttcctgatggctttacctatgcttatggaaattggattagagaggggttttaggactgccttgagtgaatttgtgctgatgcagcttcagttggcgccagtgttctttacgttctctcttgggacaaagactcactactatgggaggacgttacttcatggcggtgccaagtacaggtccacaggaagaggatttgtcgtctttcatgccaaatttgctgataattacagactgtattcccggagccattttgtgaagggacttgaaatgatgctgctactcgttgtgtatcaaatatttggtagtgcttacagaggcgtccttgcatatcttttgatcaccatatctatgtggttcatggtcgggacctggctttttgctcccttcctcttcaatccttctggttttgaatggcagaagattgttgatgattggactgattggaataaatggataaacaacatcgggggtattggtgttccggcagaaaaaagttgggaatcgtggtgggaggaagagcaagaacatctccggtattccggaaaacgtggtatagttgttgagattttgctagcactgcggttctttatctatcaatatgggcttgtttatcatctcactataacagagaagactaaaaactttctggtttatggagtatcatggctggtgattttcttgatattgtttgtgatgaagactgtttcggttggaaggcggagattcagcgcgagttttcagctgatgttccggttgataaaggggctgatattcatgacgtttatcgcaattattgtgatattgatcacactggctcacatgacgatacaagacataattgtgtgtatccttgcctttatgcccacaggttgggggatgctcttgattgcgcaagcgtgtaagccggtggttcatagagcaggattctggggatcagtgaggaccctagctcgtggatacgagatagtaatgggactgttgctgttcacgccagtggcgttcttggcatggtttccatttgtgtcagagttccaaacgcgtatgctctttaatcaagctttcagtagaggtcttcagatctctcgtatccttggaggtcatcgtaaggatcgctcttctcgaaacaaggaatgattcatctcttcattgtaatgacagggaagggatcttaatttatcccttttttatcttcatggatgattagggttaatgtaatttagttttcaatatatcgcttaggtaaaaacattgtagtattcatctataaattagacgttatctatc

SEQ ID NO: 184 - DNA, 6037 bp, Arabidopsis thaliana
ctttgcgtacttagcagctaagtagcttaaaaagttgtggctcctttgctccgccattgttagggtttctggatctccgtttctctggaggctgaggaaaccttaaaacgatttaaaacctggaggttatagggtagacaaaatgtctgctacgagaggaggtcctgatcaagggccgtctcagcctcagcagcggcggattatacgaactcagactgctggtaatcttggagagtcattcgatagtgaagttgttccatcatctcttgttgagattgcccccattcttcgggttgctaatgaagttgaatctagtaatcctagggttgcgtatctctgtcggttttatgcatttgagaaagcacatagattggatcctacctccagtggaagaggtgttcggcagtttaagactgcacttctacagcgtcttgaaagagaacatgatccaacactgatgggcagggttaagaaaagtgatgcccgtgaaatgcaaagcttttatcaacactactataagaagtatattcaagctttgcacaatgctgctgataaggctgaccgtgcccagctgacaaaggcataccaaactgccaatgttttgtttgaggtgttgaaggctgttaatctgacacagtccattgaggttgaccgggagattctggaagctcaagataaggttgcagaaaagacacagttgtatgtcccctataatatcctacctctcgatcctgatagtgccaatcaagcgattatgagatatcctgagatccaagctgctgttcttgctctccgcaatactagaggtcttccttggccagaaggtcacaagaaaaagaaagatgaagacatgcttgattggcttcaagaaatgtttggatttcagaaagacaatgtggctaatcaaagggagcatctgatcttattacttgctaatgtgcatataagacaatttcctaagcctgatcagcagccaaagttagatgatcaagcattgacagaagtgatgaagaagcttttcaagaactataagaaatggtgcaaataccttggtcgaaagagtagtctttggttgccaactatacagcaggaaatgcagcagcgcaaactattgtatatggccctgtatcttctaatttggggtgaagcagcgaacttgagattcatgccagagtgtctctgctacatttatcatcatatggcatttgaactctatggtatgctggctgggaatgttagtcctatgactggggaaaatgtgaagccagcttatggaggcgaggaagatgcattcttgaggaaagttgtgactcctatttatgaagtgattcagatggaggctcaaagaagcaaaaaagggaagtctaagcactctcagtggaggaactacgatgatttgaatgaatacttttggtcagttgattgttttcggttaggttggccaatgcgagctgatgctgatttcttttgtctgcctgttgctgtacccaatacagaaaaggacggggataacagcaagcctattgtcgccagagatagatgggttggtaaagttaattttgttgagattcgttctttctggcatgtcttcagaagtttcgatcgaatgtggagcttctatattctgtgcctccaggccatgattattatggcctgggatggcggacaaccaagttcagtctttggagctgatgtattcaagaaagttctgagcgtgtttatcacagctgcaataatgaaacttggacaagctgttcttgatgtgatccttaatttcaaagctcatcaaagcatgacactacatgttaaactaagatacattctgaaagtgttctctgctgctgcctgggttattattctgcctgttacttacgcctacagctggaaagatcctccagcatttgccagaactatcaagagttggtttgggagtgctatgcactcaccttctctatttataatagcagtcgtttcctatttgtcacctaacatgctcgcgggtgtaatgtttcttttccctctgctacgacggtttcttgagaggtccaactacagaattgtaatgctaatgatgtggtggtctcagcccagactctacgttggcagaggaatgcacgagagcgcattttccctcttcaaatataccatgttctgggtgttgcttattgcaacaaagctggcattcagttactacattgagatcaggcctttagttgccccaacacaagccattatgaaggcccgtgtgacaaattttcagtggcatgagttctttcctcgtgccaaaaacaatattggtgtcgttatcgccctctgggcccccattattctggtatattttatggatagtcagatttggtatgctatattttccacattatttggaggtatctacggtgcattccgccgccttggagagattcggacactgggaatgctcagatcacggtttgaatcactgcctggagcttttaatgaccgcttaattccagatggaaagaaccagcaaaagaagaagggaataagggcaacgttatctcataactttacggaggataaggtacctgtgaacaaagagaaagaagctgcaagatttgcacagttgtggaacacaataattagtagttttagagaggaagatcttataagtgatagggagatggatctgttgcttgttccttattgggctgaccgtgatttggatctcatacagtggcctcccttcttattggctagcaagattccaatagcattagatatggcaaaagacagtaatgggaaggacagagagctcaagaagaggattgagagtgacacttacatgaaatgtgctgtccgtgaatgctatgcttcattcaagaatatcataaaatttgtggttcagggaaaccgtgaaaaagaggtgatagagatcatatttgcagaggttgacaaacatatagatacaggggatttgattcaagaatacaagatgagtgctcttcctagcctctatgatcactttgtcaagttgatcaaatatttgcttgacaataaggaggaagatagagatcacgttgtaattctcttccaagacatgctggaagttgtaacaagagacattatgatggaggattacaatatatcgagcttggtagattcaagtcatggtggcacttggcatgggggaatgatccctctcgaacaacaatatcagctgtttgcatcctcaggtgccattagatttcctattgaaccagtaacagaagcttggaaagagaagatcaaacggatatatcttttgttgactactaaagagtctgctatggatgtcccctctaacttggaagcaagaaggcggatctcattcttctcaaattcgttgttcatggacatgcctatggcacctaaagttcgcaacatgctatcattttctgttttgactccttattacactgaagaggtcctcttctccttgcgggacctggaaacaccaaatgaagatggtgtttcaatcctcttctacctacaaaagatttttccagatgaatggaacaattttcttgagcgggtgaagtgcttaagtgaagaggaacttaaggagtctgatgaattagaggaggaacttcgtttatgggcttcatatagagggcaaactttgactagaactggaatgatgtactatcgaaaagccttggagcttcaggcattccttgacatggctatgcatgaagatttgatggaaggttacaaggctgtagaactaaattcagagaacaattcaagaggtgaaagatcactctgggcacagtgccaagctgttgctgacatgaagtttacatatgttgtatcatgtcaacaatatggtatccataaacgatccggtgatcctcgtgcgcaggatatattgaggcttatgacaagatacccttcactccgtgttgcatatattgatgaggtcgaagaaccagtgaaagacaagtcaaagaaagggaaccagaaagtgtattattctgtgttggttatctacaggattaggcttcctggacctgctattcttggagaaggaaagccagaaaaccaaaatcatgctatcattttttcccgtggagaaggtttacagacaatcgatatgaatcaggataattacatggaggaagcgttaaagatgaggaatttgcttcaagaatttcttacaaaacatgatggtgttagacatccatccattcttggacttagggaacatatatttactggatcagtttcatcccttgcttggttcatgtcaaatcaagagactagttttgttaccattggtcagagattattggcaaatccattgagggtgcgtttccattatggccatccagatgtttttgatagactgtttcatctaacaagaggtggtgttagcaaagcatccaaggtaatcaacctcagtgaagatatatttgcaggattcaattctacacttcgtgaaggaaatgttacccatcatgaatacatacaagttggtaaaggaagagatgttggtctaaatcagatctctatgtttgaggccaagattgctaacggcaatggagagcagacattaagtcgggatatttacaggcttggacaccgttttgactttttccgaatgatgtcatgttacttcaccactgttggcttttatttcagcaccctgattactgttctcactgtctacatcttcctttatggacgtctctatcttgttttgagtgggctcgaacaaggtttaagtacgcagaaaggcatccgagacaatacacctttgcaaatagctctggcttcacagtcttttgtccagattggtttcctgatggctttacctatgcttatggaaattggattagagaggggttttaggactgccttgagtgaatttgtgctgatgcagcttcagttggcgccagtgttctttacgttctctcttgggacaaagactcactactatgggaggacgttacttcatggcggtgccaagtacaggtccacaggaagaggatttgtcgtctttcatgccaaatttgctgataattacagactgtattcccggagccattttgtgaagggacttgaaatgatgctgctactcgttgtgtatcaaatatttggtagtgcttacagaggcgtccttgcatatcttttgatcaccatatctatgtggttcatggtcgggacctggctttttgctcccttcctcttcaatccttctggttttgaatggcagaagattgttgatgattggactgattggaataaatggataaacaacatcgggggtattggtgttccggcagaaaaaagttgggaatcgtggtgggaggaagagcaagaacatctccggtattccggaaaacgtggtatagttgttgagattttgctagcactgcggttctttatctatcaatatgggcttgtttatcatctcactataacagagaagactaaaaactttctggtttatggagtatcatggctggtgattttcttgatattttttttgttgtttgggctgatattcatgacgtttatcgcaattattgtgatattgatcacactggctcacatgacgatacaagacataattgtgtgtatccttgcctttatgcccacaggttgggggatgctcttgattgcgcaagcgtgtaagccggtggttcatagagcaggattctggggatcagtgaggaccctagctcgtggatacgagatagtaatgggactgttgctgttcacgccagtggcgttcttggcatggtttccatttgtgtcagagttccaaacgcgtatgctctttaatcaagctttcagtagaggtcttcagatctctcgtatccttggaggtcatcgtaaggatcgctcttctcgaaacaaggaatgattcatctcttcattgtaatgacagggaagggatcttaatttatcccttttttatcttcatggatgattagggttaatgtaatttagttttcaatatatcgcttaggtaaaaacattgtagtattcatctataaattagacgttatctatc

SEQ ID NO: 185 - DNA, 5616 bp, Arabidopsis thaliana
atgaatcagcccaacagagggcagattctccaaactgtgtttagccactttttcccagtagctagtcctgacagtgagctggttccatcttctcttcatgaggatattactcccatccttcgtgtagccaaagacgtagaggatactaatccccggagtttatttcttcaagatcttgacatcaaatctgtggatgattctataaatatactgtcaggtcattcacatgcgctagataaggcaaacgagcttgatcccacatcaagtggacgtgatgttcgccagttcaagaatacaattcttcaatggttagaaaagaataatgaaagtactctaaaggcaagacagaagagtagtgatgcacatgaaatgcaaagtttctatcaacaatatggtgacgagggcatcaatgatttgctaaatgctggtgctggcagttctagttctcaacgtacaaaaatatatcaaactgctgttgttctctatgatgtcttggatgctgttcatcggaaagctaatatcaaagtggctgctaagattttggaatcccatgccgaggtggaagcaaaaaacaaaatctatgtgccttacaatattcttcccctcgatcctgatagtaaaaatcacgctatgatgagagatcctaagattgtagctgtattaaaggcaattcgttacacaagtgacttaacatggcagataggtcacaagatcaatgacgatgaagacgtgctagactggctaaaaactatgtttcgctttcagaaagataatgtttcaaatcaaagagagcacttgattttgttacttgctaatgtccaaatgcgacaaacccagagacaaccaaatttgttggatgatcgagccttggatacagtgatggagaaattattaggaaattacaataaatggtgtaatcatgtgggcctggaaagcagccttaggttccctaaggataagcaacaaaaggtggtacaacagaggaaactactatatacaggactctatcttttaatatggggagaagctgcaaaccttagattcatgcccgagtgcctttgctatatctatcaccatatggcgtttgagttgtttgagatgttggagagtaaaggtagtaagaagaaatataagcctaaaaacccaacatatagtggtaaagatgaagatttcttgacgaaagtagtgactcctgtttacaagacaatagccgaggaagcaaaaaaaagtggcgaaggaaagcattctgagtggagaaactatgacgacttgaacgaatacttctggtcaaaacaataccttgataagttagggtggcctatgaaagccaatgctgatttcttttgtaagacatctcaacaacttggtctgaataaaagtgagaagaaaccagatctgggagatggatgtgtcggaaaagtcaattttgttgagatacgcaccttttggcatctatttagaagttttgacagaatgtggagtttttatatcttgtctttgcaggcaatgatcataattgcttggaatgaaaccagtgaatctgggggtgcggtctttcataaggttttgagcgtcttcatcacagctgctaaattaaaccttttccaagctttccttgatatagctctgagctggaaagcaagacatagcatgtcaacacatgtgaggcaaagatacatcttcaaggcagtggcggctgcagtatgggttttactcatgccattaacttacgcatacagccacacctctattttcattgtggctattcttatctacttatccccaaacatgctcccggaaatgttgctcttgattcctagcatccgacgtacacttgaaaagtctgactttaggccagtgaaattgataatgtggtggtctcagcctgaactgtatataggaagaggtatgcatgaaagtgcatggtcaatctacaagtacatgatgttctggattgtcttgttaacctcaaagcttgcattcagttattatgtggagcagattaagcctcttatgggtccaaccaaagaaattatgagtgttcctatgccaggctactggttgcccgagtttttccctcatgttaagaacaatagaggtgttgtgatcacactctggtcacctgttatccttgtttatttcatggacactcaaatatggtatgctatagtatcaactctggttggaggtttatatggagcttttcgacacatcggagagatccaaacacttggaatgttgaggtctagatttcagtccttaccaggagcctttaatgcttgtttgattccaaatgagaatacgaaagaaaaaggaattaaattggctttctctcgcaagtgccacaagatcccaaatactaatggcaaggaagcaaaacaattttctcagatgtggaacaccataattaatagttttcgagaagaggatctgattagcaatagggaactggaactcctgctgatgtcatgttgggcttaccctgatctggattttatccgctggccaatttttctgttggccagtaagatcccaatagccgtggatattgcaaaaaaaaggaatggaaaacaccgtgaactgaaaaatatactggctgaggacaattgcatgagttgtgctgttagagagtgttatgcttctattaagaaactcttgaatactctggtcaccggaaatagtgatttaatgctcataaccacagttttcaccattattgacacacatatagagaaagatacactcttgacagagttgaatttgagtgttcttcctgatctgcatggccactttgttaagctaactgaatatgtgctgcaaaacaaagacaaggacaagattcagattgttaatgtcttgctgaaaatattagaaatggtgacaaaagacatactaaaggaagagatcaagaggcttcatcttttgcttactgtcaaagagtcggctatggatgttccatccaacttggaagcgcgaaggcgtcttacattcttttcaaactcattattcatggaaatgcctggtgcacccaaaatccaaaacatgctttccttttcggcactaacaccatactattcagaggatgtccttttctccacatttgatctggaaaaggaaaatgatggagtctcaatactgttttacttgcagaaaatatttccagatgaatggaaaaactttctggaacgagttaaatgtggcactgaggaagaactcgacgcaatagattatttgaaagaggagattcgtctttgggcatcttacaggggccaaacactgaccaaaacagtgcgaggcatgatgtattaccaaaaggctttggagcttcaggccttctttgatctagctaatgaaagagaattaatgaaaggatacaagagtgccgaagcttcaagtagtggaagttcactctgggctgagtgtcaagcacttgctgatattaaattcacctatgtggtcgcatgccaacaatacagtatacataagagatctggtgaccaacgtgctaaagacatattgacgcttatgactacgtacccatctttacgtgttgcttatatcgatgaggttgagcaaacacatatatatagtaaggggacaagtgaaaatttttattactcagctcttgtcaaagctgctccacaaacctattctaccgattcctctgattctggtcatatgctagaccaggtcatttatcagattaaactaccaggacctcctataataggagaaggaaaaccggaaaatcagaacaatgctatcatttttacacgcggagaagcgttgcagacaatagacatgaaccaggattattacatagaagaagctttcaaaatgaggaacttgctacaagaatttcttgaaaagaatggaggcgtgagatatcctacgatacttggactaagagagcatattttcacacgaagtgtttcttgtcttgcatggtttatgtcaaatcaggagcatagctttgttactattgggcagagggtgctagctaatcctttgaaggtacgatttcattacggtcatccagatgtttttgatagagtatttcacctgaccagagggggtgtctccaaagcttctaaagttattaatctaagtgaagacatatttgcaggtttcaattctactctacgtgaaggcaccgtgagtcatcatgaatacatacaagttggtaaagggagagatgtgggactcaaccaaatttcaatgtttgaggcaaagatagctaacggaagtggtgagcaaactctaagtcgtgacctatatagactaggccaccaatttgatttcttccgtatgctctcttgctatttcactacagttgggttctatttctgtagcatgttaaccgtgcttacggtctatgtatttctctatggacggttgtatctcgttctaagtggggttgaaaaagaattggggaacaagcctatgatgatggaaattatccttgcttcgcagtcgttcgtgcagattgtttttttgatggccatgcctatgatcatggagattgggcttgagaggggattttatgacgccctatttgattttgtattgatgcagctacaacttgcttccgtatttttcacatttcaacttgggacaaaatttcattactactgcaagacattgttgcatggaggcgcagaatacagaggtactggccgtggatttgtggtgttccatgccaaatttgctgaaaactacaggttttactctcgtagtcattttgtgaaggctactgagctagggattctcctactcgtgtatcacatatttggcccaacctatatagggttgttcactatttcgatatggttcatggtgggtacatggctctttgctcctttcttattcaacccatctggttttgagtggcatgaaattgtcgaagactgggcagattggaaaaaatggattgaatatgataatggggggataggtgttcctccagagaagagctgggaatcatggtgggagaaggatattgaacatcttcaacactcgggaaaatggggtatcgttgttgagattttttttgcattacgcttcttcatatttcagtacggacttgtgtatcaactcagcgcctttaaaaataaatatagtagtttatgggtttttggggcttcatggttactgatcttaatccttttactcactgtgacggttttggattatgcaaggcgacggctgggaacagagttccaacttttattcaggatcatcaaggtttccttgtttctcgcatttatggcaatattcattactctcatgacttgtcgtcttatactaccccaagacgtcttcctctgcatgcttgcattaatcccaactggatggggattactacttattgcacaatcttgtaagcctctgattcaacaaccagggatatggtcttgggtgatgacgttggcttgggtctacgacctcgtgatgggttctctcttgtttattccaatagcgtttatggcctggttcccattcatatcggagttccaaacgagaatgctctttaaccaagcctttagcagaggtctacatatctcacgtattctcagtggtcagagaaaacaccgctcctccaagaataaagactga

SEQ ID NO: 186 - DNA, 840 bp, Citrus
ctgatacataattttattcaccaaagtcacaagacataacattgatcattcaaaaaaaaaattaaagacacatccagcaaaaggctaataatattataagcacagttgctcagtttatagatggcgggtggtacatgccctccactgccagccaatttctgtctctgccaatttcaaaattagagcagagcagaaaccaccgtactagaatacataatcaaaatataaaacgccaaagggccatttcaaaataagccctttgtcattttgataccagattcaactaacgctattacactcattattttatacttgaaaatgtgaaaaaaaaaaactgctggattttggaggctgagtttcaacttcagggaacttggaggccactgaaggtttggccaaaggaccagccagctggggcaacattgttagagacaacagtgtggccatcacttgtggtgaccttaaatgagaggctttggccattgaggtaactgttactttgccagttttgaccccagttccttgacatgggttgccaatcagttcttgaccctttgattgaaacagcacgcacatcaccagcgcctccgacgtttgtgattaggactaagttgaagtaagaatggccgttgatcgtgaatctgatgcctcccttcctactgcatggaacccttctgtaagacacaggtactatcccagctttgtactgagcaatttgttcaaacacaggctgagagaggtcaaaatgttgctggggaggattgcaccagccaccggcatgtttgggagagcattatttggagggcaaaaatttgtggcagtaacaaaatggagcccgga

SEQ ID NO: 187 - DNA, 834 bp, Citrus
ttttttttttttttacaaagcattcatttttcattgggaacaattagagtctttcacaacataagcattcgctaaaagcaagacattaggcaggcagggtgaccattttgcgcaccaccactactaaaattcgatctcttttttctcgcacttctttgctaacatcaataatgggctgaaaagtatgcaagtaggcccactagcggagcgttaatgtatgttgtgggctccgactcttggaaatagggccttgaatctggaaaagcatccgtcacattaggcccacctacaactgcccctacgtgtacgttcgggttcggatttgggcttaaaaaatatcgactccccgctttgcaccctatgtgggcggggtgggcctgaaccgatggtagtgagctgccccgatgatggatcctctgggggtaacgtgcaccatatccaaccatgtaggacatccccactggattatctcccaagatgtagtccacctgatgttttgccaattgtcttagaaggttgggggaggcggatcttgagccacatggcacgaccttgttggcgtggcttacataattagaataagccagaagtaggaaagacagtgacgtcacatgctgcatgttacttcctccagccttgaagatcaatcccccaggagagtattgaacttgagggtgagaaattccaggcattatagaacagataaaaccgtcagcattttgcttgaaagactcaaagtagtcagctttccccatcagcacctccttggaaatgagaacgttgatccctgcatgtttgttatcccaaccgaactcattgattgtatctccagcg

SEQ ID NO: 188 - DNA, 541 bp, Citrus
cttaatcaaatttaatgtaaagtagtaacatgactaaacatgattcacatggccattaaacagcagctactagacatctcccatcaggggcggacctaataaattcagctctgagaacatagttttatttttttaatatggccccgtaagtttaataatttagcagtttaacccaataattaaatacacttttttaacctttactccttaaagtttacttttataaaattttggcccccctggaattttattcccagctcccaccaatgtctcccctctcttttccttcatgacattcctcattaagccaggtacgtgaacatttgtaatgtaatgcttccagtcaatgctccccatgtcaaatccaaactttttcttctcttcttcattcatgatctgcattagccccagtgtgttgctgcaatcaaaccttccagcataaaatccgtatggaaggtacacattagcgaactcctttctgcgtaaaatttcatattgtttctgagccagcagctcgccatttgaagatccaataatgcct

SEQ ID NO: 189 - DNA, 764 bp, Citrus
ctattactttgaagccacttcagcttttacatctcacttcaaccaaaacagaaaccaaacccagtctccaaccaaatccgtcaaagtcaaaaagttcacactcacagtgacagagttacacagtatactttccctcattttctttctcactttccgggataaaacaaaaaaagcgaaaaaaacaacaaaacatggagtgggggaaagggcttgaaactaaaccctgaaattctttcccgtgaaagtttgaccaaattgccaattagcagggacaatgttccaagaagtggaagtacggcggtcactgccagtgaccctgaagctgagagactgaccaaccaaaacagaattagactgccagttctgtccccagttcctgctcaagctcatccacccagtcctggaacctttgacgctagccttgacaatatccccagcaccagcaacgttggtgatcaagaccaagttgaagtaacggaaaccgttgatggtgaacctgatgccgcccttcttcctgcaagggaccctgcggtaagagacagggacaattccggcgcggtattcggccatcttgaggaacatgggcatggcgagatcgaagtgagggcgaggagggttgcaccaccccccattgtcgctgggttgagcgaaattcggagggcaaaagttggtggcagtgacgaagattgaagggctcccagcgtggcaccattgagggtcattcgcacacttaatctcaaaacacgcaccgcaactcaacccgt

SEQ ID NO: 190 - DNA, 801 bp, Citrus
tttttttttttttttttactcttcgtaattatacatccttttgattgataaaacgctcttaggtaccacaacaattcactctcaataacttatagtatacaactcaagacaccaacgtgaacatccaatgtacaaaaatgtaaaatattagtggcaacagataaaatttcgatcttttttatactttatatccttaaggtcaaatcaaaaactttccacgaggtgaagaccgactcctcttaaattcgggcattgatgtattattgcctccttcctctgcttggtgagttgcagcatttcgcagcttgttttcaagtttctcagccaaaaagggttccactggctgcaccaatcccctgcttggttctagattttgggagttccttgagaagttctgttgaaccttcttcatctttaattcactgtgcactggtgaaccaaggagcaaatgctcattttctggttcggagaaatcactttttctagcctcatccatcttttcaccagtatccatatcagaaagcaatgttattcccatatcagatttctggaatctagctggaagttgatgcttggccttggccttgctctctggcttgctttttctaatgccaccttgtcttatattaagagcttgccgaatttggtcatcttcatgctctgtgtatttactcctgtggctgaccttttggaggctggacaatgcatctaaaacattatcctgctgctttgccggttcttgtgaacctatatacactcttgaattattgatttctattgaagatgtgatcacaggcgttg

SEQ ID NO: 191 - DNA, 617 bp, Citrus
ttaccttaaagaaagcggaatccttttaatttattccttcgttaattaaatcaaaagatctcctttaagtacaccatcccactatttatttagcaactagttaagtattaaggaggcaggggtacacaatacatgccaagcaacacactaaaaaaaaaaaaaagataaagtaacagcccttgctgatgctgggcaacaaaatactaaaatatctaaacgacattaagaagctgataaccaggaaccagtaatggaaaagttgttcccatatatatatatatatattcttctattccatgatatggcatataataataaagcttgggatatcccaaatttatttaagctgaatttctgactcataagcaacgccagccttccaatcgctaggaatagcattgtttgccacaacccatgtgagccccgcgctgccactcacttgaaacctcaaactaattgctccttctgggggactaaagatgtcaaatactgcaccgaaagcccttctcattgccacccattcttgataatcctcctgccatatttcaactgctaggacatcattttggccagctacgtacaaaatggctatggccacgtaatgggggtacctgctg

SEQ ID NO: 192 - DNA, 376 bp, Citrus
acaacaccaagtcttaattttgtttttcttgggggagcatcttattcttaattagttgggttgaaattaaaaccaaatgggtgtcgctgtgggcatcatttgtattgtgacttttgttacattttcctcccttagtgttgactgcgagaatccccggcgtttacggtggcgaggcatggcaaagcgctcatgctacattctatggaggcaatgatgcctcaggaacaatgggaggtgcttgtgggtacggcaatctctacagtcaaggatacggcgttaacacggcagcgctaagcacagcactgttcaacaacgggttgagctgcggtgcgtgttttgagattaagtgtgcgaatgaccctcaatggtgccacgc

SEQ ID NO: 193 - DNA, 640 bp, Citrus
tttttttagcaaaaaggcaaaatttccattaaagccactttacacgaaaaaggaagaaaatagaacaaaaattacatcaaaggcctttagttctagtactattgttactggtgtcaacattatcgtaaattttaagcctttttcggggactttggggatttcggggtctcagatgtagaagttgttttctttggcagaaggaccggattgatatttggaagtacaccaccacttgctattgtcacgccttggagaagcttccccagttcgtcgtcgtttctaactgccaatagcacgtgcctcgggtttattctgttcttcttattgtcacgtgctgcgttccccgccaactccaacacctcagcggcgagatattctaaaacggcggccatataaatgggggccccagagcccattctctgggcatagcgaccctttttcaggaaccgggcgatacgaccgaccgggaattggagaccggctttcactgatttcgatatcttcttcctctcgccgccgcctctccttcctcccgctcctttcgttggcttcgtcacctccatttggtcttaatatgccgccgacggaaaagttgagtttcttctgaaaagattttgtttgtttacgactttcgagcctc

SEQ ID NO: 194 - DNA, 523 bp, Citrus
ttttttttttttttaaaatgaaaagcgaaccccacaaatagattaagtgaaagaacataaatgcagtttacattctatcaatacaatgactttcgaagagatcgcattgaacaaaaagaataaaagaatgaaagaccaatcacaagccagtcccagcacaaggacttttggagtgaaaaaaaattagaaggataacagggtttatcctccacagaacttccagcaattcaagaactgctaaagctagttgcaatagggatgacgataagaagaatgatcaacaacaaaagtattatccccacacacatccacttcctattgctcctctggtagtccttggcggtcttgagctctttggttccatccttgacataatgtgaagcattcatcacatggggctcaatatcatccatctgctcgccctgcgcctccaccatcacagccatgtccaagaaaatttgatgtagctccagcaagctcttttcaatctctttcgccgtgtcatgcctgtcctgaatctcca

SEQ ID NO: 195 - DNA, 658 bp, Citrus
ttgaattaactataaattgttgagctattgaacttttgataccaataacatgaacttacaggatacacagataatatatagaaccagcaggctacacaatttagcacttccatgcagccattttagacgcagctagcatatcttattctcacatatttataattaattacccaaattcctcagtaatatatatcatttatcaatcatttgatgtcatatctccatgagctgctcaaagatcttcatggcagaagctggcaaacccaaaagcacatttatatttttcctctgcgtcccatgagataggaacagaatcacttccttctcaggcaatgccacaggccctgagaaaattggctctccccatccgaaatctattgtgtggaaagagagtctgtaccaagttgtgattaccatagttgcagccaatgaaggcctagcccttgtgatctcaaaatagtcgatagccgatctcatgtaactgtctgtgaccatggaaacagcattctgcactaatcctacagcaaatgaaagtggattcgtcagtagctcccctgctttactcagggagtatgttaatacaatcccatttccgaagaacccctcaggtaacggtggctcgaatcttgaccgtccatcaacagcaaagaggagcctc

SEQ ID NO: 196 - DNA, 655 bp, Citrus
ggggatcgcaaaccgcttcgaatttattcaaaactctcaatcttcctcaaaagaaaaacccatttctcaaccatgagttcagaagctgcagcaaccaagggtgggcggggcaggtccaaggacacgaaaccggtgtccagatcccacaaggccggtctccagttcctggttggccgtgtcgctcgcttcctcaagaaaggccgatacgcccagcgcgtcggatccggctctcccgtctatctttccgccgtccttgaataccttgctgctgaggttttggagttggctgggaacgcggcgagggacaacaagaagaacagaatcattccaaggcacattcagttggctgtgaaaaacgacgaggagtttagcaaactgcttggctctgtgactaccgctaatggtggtgtgttgcctaacattcatcagaacttgctgccgaagaaagctgcagcacggaagggcgaaattggatccgtgtctcaggagttttaggggtttaattagggatctggaatcttcgatttcgggttatgtttataagtatgtagtgaatttgggttttcactttcatatgtgtaaatctcattttggataattgagtaaaaatcctgggtttcttcgtaaaaaaaaaaaaaaaaaaaaaaaaaaaaaa

SEQ ID NO: 197 - DNA, 434 bp, Citrus
tttttttttttttttttattaaaaggctaattatctattagattaaaaacattttaacaaacaccttagatacatactagacccgatctaatccatcggatagacatccaaacattcatctaaaccccaaatattgaccaaaagactaacatcgaagtaagaggaacaaaatacattaaatcagaaagttcctaagccctttcacccctgatccgcctagcaagctgaatgtccttgggcataatagtgaccctcttagcatgaatagcgcagaggttggtgtcctcgaacagcccaacaagataagcctcagcagcctcctgaagtgcagcaacagcgctgctctggaacctcagatccgtcttgaaatcctgagcgatttccctcaccaatctctggaacggaagcttcctaataagaagctcagtgccctc

SEQ ID NO: 198 - DNA, 683 bp, Citrus
cccaaaaagctcgttcattcttcttcttcctctgtctctcggggatcatcaactgcctgcaactacgtccttcgtttaaaaacacaatggaagtagctgcagcagcaggccccggggcaactcctacagaaaagcgccgctggagcaggaggccatcatcttccagctccttccgattacgttgccccagcctcaacactctccgtctccgccgcgtattcgacatgtttgacaaaaacggcgacgggatgatcaccgtcaaggagcttcaccaggcactcaaccttctcggactcgaaaccgacctctcggagctagaatccaccatcgcctcccacgtcaaacccggcaatgaaggccttgagtttgaagattttgtatccttgcatgaatcattagatgaaactttttttccattaaatgatctgacatcaaccacgacaactgatgctgacgaggggaacaagaaggtactgtcgcaggaggaggccgacttgtcggaggcgtttaaggtgtttgatgaggacggagacggattcatttctgcacacgagttgcaagtggttttggggaagctaggcttgaccgaaggcaatgaaattgccagagttcagcagatgattggctccgttgaccgcaaccatgatggccgcgttgacttcttcgaattcaagaacatgatg

SEQ ID NO: 199 - DNA, 734 bp, Citrus
  misc_feature (537)..(537): n is a, c, g, or t
ttttttttttgccttaattgtcatgttaaaataatcaaacgatgaaagatggacaagactcattgatccatgttggatcagtcttatttaatttacttacaataagagcgtaacaaactaacaatttagttgtccacctacaagtgtgacatctaaagtttttattaagtagcttttattaagcttattttactaaaacgttgatcatgatgatcacatagattgtgccatcagattaaggccataaggccgttggttggagcaatcaagattgtcaccaggctgaatcccaaacttgccacagaaagtggtaaagaacccaatacggttacgtacagcgtcattcccaacgtagccacattcaattccaccgttgattatatttgtggttagaccgtatcccggaagccggccggcgtttacgtcatttgctgatggtttccattcgtcgataatgacttcgtggcacgatggctttggtggctgtgcagtcatccagaaccagattgctgacttgaatgatagtactggatcagnggcaagtaggtctggattgttcaacaagtccacccccaaggcttctccgcaccttaagtaattgcaattccaagtgagttgaattggacctcggccatagtattgccctggcaagggacatggacagtaaggataacagtagtcggacgacgcagggctaacttgcctaatatagcaatatccccaagcatattctc

SEQ ID NO: 200 - DNA, 836 bp, Citrus
ttttttttttttccagacaaacaaacaaattgaaattttatatagcaagaaatacttcttaacaagttctgtaaagaaccgctcaaaaaaagatataatttaacagatataataagaagcaaatccacgaacaatttcaagttttcgacctctctttctttatcaacgaaaattaggcacaacataattcgtccttgaagctttgatggccagaagaaggcttggtcttcaaacgataacgatagaggagcttcttcttcttagaggtcggattgtcaatggtgagaacaactttgcctggttcaacaatcttgaaactgtcacataccacaggctgttcagcatttgaggccaattttttagccttttggattatcaccgtgtagcttccttcagtacttggcacaaactctgccccatagctcacttcccatcccactacccgcacttcccaggtcaaatggcattcctcagtaactggaaattcaacagtgtgcttagctgctggcttgacggtgatctcagtaactgcatctgtggcagcaaattcacctactttgctcagcccgccatattttactggtagttgctcagctgctatgtaccttagaagggtctctgcggatttggatggaccagcaaagacaaacttgcttctagttctctgagtcaaaaatgggcttatcatcctgttaactgccaggtaccaccatggtacattgataaacacctgtttagcaacaaactcagggtaattgtcctggagcaactgaagggcctgtttggtagcttgtctaagctcccacttagcaggtcctggagaattcttcaagtca

SEQ ID NO: 201 - DNA, 841 bp, Citrus
tttttttttttttttttaatatcaaagcacaaccataattaataccaaatcacaattttaatacaatacaagagctttattgttttcagaagtctagaagattattgatggggatactaaataataagtatttctttttgtgaaaatattttacaggcaaataaactataacactaatatgcttcatcataattaagctaaaacggagcaaatcctagaattgaaatatctcattcggtatggcaaatgggcattcaatattgttagtagtaattggtccaaagttagcaatcccattattctcctccatcttgtcttgcaaatacttgtttgcagctgtcagtataccctcctttttcctcaacaggttgatctcttgaaacataatgtccatctttgttgaacgaatgttataaatccaaagttcaagatgcttttcaaggacaagtagttcatccaaagtcattgtcccggttccacctccaaacatatacctgaggcctttttggagaatttcaatctcctgcttcagcatgtttatctcatcctttgcatccaatggttgagtctgcatgactggttcagcttgagctcctcgagtggacttcaaatacttctcaattagcccttgcatggttccgttggtggccagttcatagagttttccgtggttggagaaaatgaaaacaccgatatcggcatcacagagaatggagagctccttggccttcttaaggagcccagctcggcgcttgcaaaaggtaacttgccggtgcaccggattctcaatacgcttcatctgaacctttccacgagccatttgatgaccaacttgatcagt

SEQ ID NO: 202 - DNA, 687 bp, Citrus
aaaagacaaaacagccctccgtctgtccttatcaagaatacgtagtataacatcaaacacaaaacagataattatcactaagaacaaaagataccacgatagcgatggcgtcacgtcacgatacagtgaggcccgtaacaacggaggcgtggaacacaacggggttgcacgttcaccgcaaaaggattgcgcacatgacgttcttctggggccacaacacgcaggttttgttctccgggtggccgggttcgagcaccggcatgtacgtactggccttggtatttgtattttcgctggctgtgattgttgagtggctaagtcactacaatattgtgaagccgggggctagccgcgtggcagctgggttgttcaagactgggttgcacggtgtgcgtgtcgggctggcttacatggtcgtgcttgccgtcatgtcgtttaatggtggcatttttattgctgctgtcgtcgggcatgctgttgggtacttgctctttggcagtcgggtcgtctttaataagtccggtaggtcggattcggatcttcctcctcctaagtgatgattaatgtcttaggcttaacccctgcttgaacatgctttttttttttttttctattattattgttcttttccagttctttgtttttttaatgcttgaaattcaaatggaagacgagaggatttgggat

SEQ ID NO: 203 - DNA, 600 bp, Citrus
ttcacttgcaacatacacattttacatatttgagctagcactcatatatacaagacaattaattgaacctgctctgaatacaagattctgtagcatcacgacacatatggctacacacatacatataaataataatcataggttaaacaattaattaagcgggcaattgatcaggcacccaaactaaattatcaacaggcaaaaaatggcacacaggggaagttccaggcttaattttgagcacacgaaatgaagcatgatcacgattccactgagaggtgtccatgtgacaaacagcagcagcttcaactcttactccattttcaccggtcagagaaacttgaaacaacttgttctcactctcttgataatggcaataaaagactgcatatgggtaaggcatagaatgacatgctaccatttttggagcataaatttcttcaggcaatttcaagatggtatagttttgcaaaggattaccaattaacgggtttgtgatgaaattagtggttaaaattttgaagttggtttccaatccgaagacgccgcgtgtgaaatcaagcatggattctaaggaggtagcacaaaacttggtctctc

SEQ ID NO: 204 - DNA, 870 bp, Citrus
gcaagatgggtttgggattagcttcttggaacatccttctacagctcctcctcctgtgcgcatacagaagcggtgccagggaattgagagaggagtctctgcctcaaatggatgttcaacttcatcatatgcatatagctcatcattcatcccatgtggacgtaaactcaagcgaggtcaagatattcttcaccttgagggatctaaaggtaggtaataaaatggccctctatcttccaattgaagatcattcaaattctgctcactttttgccaagcgaagaagccgattcctttccattttcattgaaacaacttccttatattcttgaattaacctccatcccacgcgtctcaccgcaagccaaagccatggaagacactctcaggatgtgtgaaaccgatcccatcaaagatgaaatcaaaacttgtgcgacctctttagaatccatgcttgattttgctggcagcatctttggctcggagacaggttttaaaactgtgaccacaaagtctaccagtaatactttccaaaattatacaatcctagaggtgcaagagatccctgcttccaagatggtagcttgtcattacatgtcctatccttatgcaatttacggctgccacagccatatgacagagaacatcaacaaagtattcagggtttctctggtcggtgacaatggagatatagctgacgctatttcagcttgtcatctggatacctctcagtggaatcctgaccatctatcatttcagatacttggtattaagccgggaactatccccgtctgccactacttcccaacagatcatcttgtcttcgttccagcagctaaagatgagtttatgtaatgtctgattgtattca

SEQ ID NO: 205 - DNA, 381 bp, Citrus
tttttttttcatgtgcatgtaaaatttcgattttctctcctatttaatacagcggcaaagaattaaattatcattatatttattcttttttctgcttcgtcttcaaagtgcaagataacccctaaggggttgaggccttttttctacaaatcgatacccttcctttaccaccccgatggaggtggtctatggaattcataactacaactctgactgcaggattcttgaaccaactatcaattcaagaaattaagaaaaaggcagacctgaaataaaattagaagtctcaagttttgcttcaaaatataaataactgaaaaccatagatttcagatttattaatgaaagctattagggagtttggttttacaccaatgcatt

SEQ ID NO: 206 - DNA, 836 bp, Citrus
tttttttttttttggtagaaacttccaattactgtacgaattatcttttagggacaaacacatgaaaatatattacaatgagtatcattaagtcactacattgtactgagatttccgctgctcgtccatccttcctggacttgaatcgaatactgcagattccatagaacatcttctatcgaaggtcgcttggctgcatccttgctgagacaattgatggtgatttcaactgtagttcttaatgaatcatatgcataagtgcctcgtacggaaggatcggcttcagctcttaattttgacggggcttctgctaagcatgtctccagctgaagcttcaacccatcgacttcactggtggatttgaccagcttaccagtaataacttgaagaagaataacacctagctgataaacatcttccttctcgccgtcttcaggttgcttggagacatattgtcctctgagagggctttccaatcctttcttagatggcaagggaatgttatacccgctgagtttggctgtgagagccttatccaacaaaatgttctcagtcttcaagttgttaccgaaaatgcctggtgcaactcctgtgtgcaagaattgaactccccttgtcgcaccaataataattgccattctctgtggccatttcagcatgtccttctttttccagtcagtaaggtagtcccgtaatgatccattagaaatgtgttcaagcacaaggaatacggtgcttcccgtgttgggatgatcctgataagtaagtatgcaatgtccaagaatgctgaccagatgccgatgcctgagctttgataataattccacgtgctgcat

SEQ ID NO: 207 - DNA, 867 bp, Citrus
agcggtttgtgtttgatggtcctactatagcttctttacaagaaacgtttacaagttttgaacgacgtccaacacgctttgaggttgtgtcagcagttattttgggtgctttgataactgcaacgagagaatctgatgatgagtctaacgttcctgaacgtttggacaccataatttcagtgaatctacggcagagaatgaatccaccattcccggagcattgcatggggaatataatatccgggggattagtgtattggccactggagaaaaaagttgattacgggtgtttagcaaaagagattcatgaatcaataaagaaagtggacgatcaatttgcgaggaagttctatggggacgcagagttcttgaacctgccgaggcttgcgggtgctgaggatgtgaagaagcgggagttttgggttactagttggtgcaaaactccgctgtatgaagctgatttcgggtggggaaagcctaagtgggcaggcaattccatgaggctcaatcagataactgttttctttgacagtagtgatggtgagggagttgaagcttgggtgggattgcccaaaaaagacatagctcgatttgaaaaagattctggcatccttgcttacacttcccctaatccaagcatattttgagggttttttttttttattgcactgtttgttatttgtactggcttgctgggaacatattctggcaaatttcgctgaggcaagtatcattctccgtaaaaatgtccaaaaaaaaaaaaatggactaggtagtttggagatctcaaaatttacttaggtcttatttgattttgaggtactgaaaaaaagaaaaaaaatataattataaaaaaaaaaaaaaaaa

SEQ ID NO: 208 - DNA, 702 bp, Citrus
tttttttttttttttttaaatcaacaccaacgattttatttaactcaatcaaaacagaccagcaatgtggttagaaattatgcatcctccattagaagagaacaaatatatatttattcaagcaaaaatatcaaaattagcctagcacgcatcatcaataatgcaacacataaatattgtattcaactgttgcatctccagttgtagcatcaaacttatgagttctagcctcaacgtaccctctagcaaaccggaaaagcccgcttccgccgatcaccggcatctccctcatcggcgaaaacaccttattcctccccaatacacttattgggcttccattatactttccttccatgaaagcaaaattcattaccatcatcaaaccattttcatctcgcgcagcagatgcataaaacccttgcgcctttcccaccaatttcgagctcaattcgggcccttcggtcaacggatcatcaatcatgcttatggcaccgaacaatgtcgatgaattcttctgcggcgccgccaccactgccactgctgtagggttgctgccgctatagatgtcgtgccaatagagtctaaagtggctcaacttttcttccttgaggcgaaaaaagttcttgtctagggttgtcgcataaccgtagctttgattagagaaagaaaataggaagaagatgatgatctgagaagctaaca

SEQ ID NO: 209 - DNA, 792 bp, Citrus
tttttttttttttttttggagaaagaacagattatatatataaatttccaaattcttacaacttaatatctagaaaataattatgagttcagaaatggtgccacttgaggcaagattggggaggcactcaaccggaatgcttctcttcttctgtctttctgctgctcctacatgtgaacaatcctattatcttaattatgttttattcgtcagaaataatgaatggaatcgaatacgtttagctcggcatgggcttgttctccaaaaacgatctgaaaagaataaatgcttgtcgagggcgatgaaacggaacctcgtgtcctgctcctgtaactgtcacaaacgtcaaccctttgtaaacttggctccagccaccaacctttctgttgtcataccatgggtaccagttgatgacagttggtagcttcaaggcatcaatggagtatcgagtagcagtaacaggaaccactgcgtcagtatcaccactgaatacccatatcttgagaccagcagcaatgagctctttataaataggaagcatggagagtggagaatcagtccagttatctccaacaatttcactgcatgttctccatggataaaaaatccatgtcacatttgcatgcagtgccttctgaacttcaggatgattaaagtacacttcagaatacctctcagtgcaaggatcgtatgctctaaacatccatggataatgaccccttaagttgcgccttagtgatgcagtaccattgcaaggcctcgtgaaaatgctataaggatcgatatttccct

SEQ ID NO: 210 - DNA, 695 bp, Citrus
ccctccaggtactaatattatagcaaacatcccttgaaataatgtctcatagaaatacaaaagagctaagccactcgctagttatttaataactaaaagaaagagcgaaggaactattcgggctgttggaagaagccaagccaagtttaaacgccctaaggcctcacttcttcttcttgccagcttcagccttggccttcttgacacctctgatcttcttttgcctgtttttcctctctttcatctgcttccttgacttctcaaccttggtagccagtccattcctgattagcctgtacttgggctcaaacttctttgcactctcaacagagtcatagatgaggccaaacccagttgatttcccacctccaaaatgtgtacgaaatttgaacacaaatatagcattcgcatccctcacatcatacatcctcgccaatttctccttcaactcggcctttgaaacgttggctcgacctggatgcagaacatcgataacaaattgtttcctcgacagaagcctgttggtcatgaactttctggttcggatggtgatcgccttgtcagccatttatgtctcaatgaatcaattgcactgcaatgcaaagcaagtctcaagtgtccggcatgaaatggtgcagatggcacttaattaagggaggctgctgctgacggttcagagattcgtggcctcgtgc

SEQ ID NO: 211 - DNA, 713 bp, Citrus
taacaataccaaatattgggcgttcaattacaacttatgaaatactcaacataggtaaaaccacagaatcatacgattcatacggttcgtataagcctttcgaggctaatgcatgtgtaggcttgaagacatcattattaagaggcggctatttataatataaaatactgctactcatgcaactgggtaggaaggtttagtggcaatgccacagagaccttcaggtgcttcaacatctctgagaatcctcatgtagccggcctcaccccagctctccccccatgaattcttaattaaccaatacttcattccatcttcagttgccccaaatccaacgatagcaacagcatgagaacactgagttccacatcctccgttaaaaataccgcctttgtaactctggaagtctggtccacttccttcaatgcaaattgatactggctgcatggctacagcttggagtaaagcctgctcatcattgggttttacatcttcaaagttactaattttagcagctgccttgacctgtgcgtcttcacaagtcccttggacttccttgtatggataatccgcttctgaggcaataccctggttttttataatatatttaaaggcattgtccatccaaccgccaccgcatccacggttaccatctattgagcagtctagtatttgctgctccgaaagtggaataagattaccactactaatct

SEQ ID NO: 212 - DNA, 889 bp, Citrus
tggaagttagaacatcagggaatctgtgcctttccttttcaacaatgacgtgcaatggcgtttcatcttcatccaatccttcaattcagacaccgcaagttactgttgtcactaacaagaagcactctaagtcgaatcatatagcaattatccttggtgcaactggaggagccttatttgttttgctcctggtatctcttgctgtattcctgtatgtgaggagaagaacagctgatcaagtctcatacccagcaacggcagcaacagatatgcgaaactggaatgcagcaagagtattttctcacaaagaaattaaagcagctaccaacaactttaaggaggttataggccgcggaagttttggatctgtttaccttggaaagctttcagacggcaaacaagtagctgtgaaagtgcgatttgaccgaactcaactgggtgctgattctttcataaatgaggtgcatctcctgtcacaaattcgccaccaaaatctggtatgtttggaagggttttgttgtgaggcaaagcagcaaatactagtctacgagtatctacctggcggatcattggctgatcacctttatggttcaaatagtaaaaaattttcactaagctgggttcgcagacttaaaatcgctgttgatgctgcgaaagggctggactatctgcacaatggaagtgaaccacgaatcatacaccgtgatgtcaaatgcagtaatatcctgttggacaaggatatgaatgccaaggtttgtgactttggactctcgaaacaagtaattcaggctgatgcaactcatgtaaccactgttgtgaaaggcacggccggctatctcgatcctgagtactactccactcaacagcttacagagaaaagtgatgtcta

SEQ ID NO: 213 - DNA, 654 bp, Citrus
caaccttcccaaaactcacttcaattctccatattctcatttccataaccctggttgcagcaaaatctgaccgcttctctaaaaccctatctccatcttcggtaaagctgagtaaacaaaagctaagccaccttcacttctacttgcatgacaaagtaagtggccaaaacgccactgctgtcagagttgctcaggcagccatgactaaccagtcgccaacgttcttcggtgctgtcattatgttcgatgatgcactgactatggagcctgagcgtaactcaaagcttgtggggagagcccaagggatgtatggttctgcttcacaaactgaaaccggattggcggtggtgatgaactttgctttcatggaagggaaatataatggtagtactctcagtgttatgggccgtaacgccgtgttttcaacggtgagggagatgccgatcatcggcggcagcggacttttccggtttgctcgcggctatgtgcaagcaaaaactcacacgattgatcttaaaactggagatgctgttgttgagtataatgtttatgtgtttcattattgacttgagtacttgactcggttgttttgatctctcctttaggctttggctatatgttacctctttctttttgtattatttgggcgttatg

SEQ ID NO: 214 - DNA, 852 bp, Citrus
tttttttttttttttttaaatttaatagtaattataccagcatcattggctgaattatgaaaataaaacatatatagtcaatcttgtttatgggccatcattatccaacagacgatgaaggcttattccatcaaacatttaaacttagctaagagcaaattttaagttcattacactgccttcaccactataggactcctcacttgatggtgtttatcatctgaccatatcaactctccaaatgcataatccttagtaacacttgcattctgagctttaatgatgactttgaagcttttctcctctccaaaatttataaacttcaagctctttggggcaattgtcactgaaactcctttcggagattttaaaagagcctggtaagttcccggagagccaacgttcttgacttttcgcgtcactgtgattgagccggagagtttagggactgagatggaagggtagttgaagtctaccagactaatggtatggttggggcatgtgtaagtgtagttttttgagaaccaaaaaatttcttttttgttgtatcccaatgtacaaagaaagttcaagtaatcattagccgttaagtcatagaccaatccaggatccatcgcaaggtttggctgcacatggcctgctccataactgaagggtgttgcttcggcaaatgaagcattcaaaatttgttgcttgttgttatcgtgtgttgatgctgtggtcataatggctgattgaattgctgcaggactccaatcaggatggaggattttcagcaggctggcaataccagaaatatgaggacatgacattgacgttcctgatacagagttgaatggactccggcgcttg

SEQ ID NO: 215 - DNA, 890 bp, Citrus
tttttcttaaaactggtaatgccattctattccattaattttacaagcacataaatatatctcgcttcattggccagtggccactccaaattctggactgccttcataaaattcacaaccattcaccaagtttgttcaactcccagttttccaagatggaccagggcctttagcaataatttctaacccgttgcagggggccataacccgaaaacccagaacgcgaaccgaaaaaacaccatttctagctcattaactgtgtccatgaaaacgcaactgggctcctaacttgatgttgagcatttccccaaacaattgaaccaaatgcagctccacccatcttctggtcaccgttctttgcaacaaatgttactgtgtatcgcttcttctctcctacagtcctgaacagaagccttttaggcctcactgagatgccaacggtagatgggccatccacggtcacattgtacaatgatcttgcaggcccaacatttgtcaactcccgagtgtaccggacaaccctctggtccccaaacaggactgagaatgatgggtagttcagttcaccaggggtgttgaattttctcgtacatgtgatgttgggtcgcttgacaatggccttaacatgttcaatggtgtagcccaaagagcacaagaatgctatgtagtcttctgttgaagcatcgtatacaaggcctggagagatggctttctgcgggttaacatggcccgaaccatgagcccacggggttgagagcctaccatctgcggcatcgtggagaggagatttggtgttgtccacaacataagcagtcgtcatcagagcagatttgatagcacttgggctccagtctgggtgggctgctttgagcaaggcagcaacaccgctg

SEQ ID NO: 216 - DNA, 337 bp, Citrus
  misc_feature (15)..(15): n is a, c, g, or t
  misc_feature (76)..(77): n is a, c, g, or t
accagtggctgaagncggggaaaattgggagtgtaggacagaggcacttgtatgcttgggcaagggtggtttctgnngaggagagaattttggtattgggatggaggccacagcatctatcgatacagcaacagacaatttgatacaacagacaataagagaagaaacaagcagatgcactgtcatccactgtggcacatcggatacccaccgttattgacaatgacttggttcttgttcttgatgaaggtaaagttttagagtatgactcgccaaggcagttacttgaggataattcttcttcgttctcaaagttagtggcagaattcttgagaag

SEQ ID NO: 217 - DNA, 881 bp, Citrus
ttttttttagtcttaaggacagtgcacagcacgcctggacttttatttattttatttacggccacattctacaaggtacaacatattacagacatgccctggcttttatttattttattatagccagattttgattcgtacaacatattatttattttattaagtattcaagacacattcgacatcatgtcaaatgtatttattatggtatggagagaagccccttcaataactgagaccgatggtgccccaagctactccatcaccaggatctggactgggacttgagtggactacaagaccccttccaataacggaatttgttccagaaagaggaatcgtcttgtaaatttcaaaagtagcaataccctcactagtaacagtgatgttttctaaaaaaccgtcagctccagcaggtttaaaagggggtccagttgatatccaatcattgcttatgtttccgtaagtgtgaataatgagtgcgtgatcaccaggcggcaaaccagagaggcttcctttcacagttgttggaccacttccttcaacgctaaaggaaacagttcccttgcgaccgttagttccagtaataactgcaactgcattcaccattgtgctgtgtgatatcacaacgcccttattttaatgcaactgaaccacaataaattagaatttcacaatctaaactcatcaaccttttcactgttggaactaggtcgaggcattttcaatttcgtctccatctgtaatgttgtctttaatagttttttcaaactttatgctcaggactgacaacatatggtcaagcatctcaactgtttagataaatcaccgccacaaattgcacattttcttgattttcactaatacaagctatcaatcac

SEQ ID NO: 218 - DNA, 554 bp, Citrus
aaaaaaaattccacctatataaaaacccatgaaagggccccagctcctccttgattaatttaagctggaaatttctcctacttgggggggttaacaatctcccaagggaaatccggatcatctctgccaaaggggccataagcggcagtcttcaagaacctgccgttgccacccctcttgagatcaaaattaatagaaatcgtcccaggcctaaaatcaaaattctccttcacaatcttcaaaatttccttgtcagggatcttcccagtcccataactatcaacaaaaactgacaaagggtcgggcacaccaataacgtaagaaacctgaacaatgcatctcctggcaagcccacttgccacaatactcttaacagcttgccttacaatggaagcaccgcttctatcaaccttgggaggatctttccctgagaaagccccaccgccgggggccccccagccaccataagtatcaataataatcttccgggcagtgagcccagcatcaccgggaggggcaccaataacaaaacgggcagatgggttaaaaaggaa

SEQ ID NO: 219 - DNA, 819 bp, Citrus
ccttttatgaaactttctcttatttatttatgttttgtcatacatacaccatgacaaatattagcatagaaagtcgtccattgtcaggacttattttgttgatacaatgtgacaacttattacttttatttcaagcttacagaggattgatggtgctattttaacttaaatcttaacatgaattttgagtccatgatttcatgcaatttatttaacagagatgatgaatgaatttgataccacaaaaaattatcttttattttcatcatctactattaaatattgcatgatatcattaccttaaaattatgttaaaattttaagctgaaagttttaggcaacctccgttacttactaatatctctcagggacagaaagtaatatcgtaattaggaccaccagtgcaagaaaatgtgctagtgcgatcatcataagcatagctataagcttgagggcactggtctttgaaaatcttagaatatttagtcggtgggcaagtctcaggtttattgaatgccccagtgcaacaatattgtggttcattaaaagctgcacatgcactcttgcaagcaataacattcccatcggatcctttgactgctagctctgatggacaaacagcattcacgttggctttacagctagatgtcgtgcaagtagcaccagaaccgccttgtggggcaactgaaagaggcaagttaaagccatcaacgaggctaagatcgaagaaaatcttgtcctttgtctgcagcaattgtgaattccacgagagatgccggtggggctgcaccattaccgttgcatgtgactttgcctgag

SEQ ID NO: 220 - DNA, 218 bp, Citrus
catctatgacaagcactggaggtttgacaatgaaggactccccaaggaccttattaggaggggaatagctgttgaagatccaaaagctcctcatggccttaagctaaacatcgaagactacccatatgccaacgatgggctcgatctctgggatgccttaaaacaatgggttactaactatgtgaaccacctattatcccgatccaagccttgtagag

SEQ ID NO: 221 - DNA, 634 bp, Citrus
caaatatgttaatttatacgatatcgattcaaaaccaaatacagtaaaacgaactaatcgttcgtaggatgatacaatcttgcgaaatacaaaatgaaccccctccccccccccccccccaaattaaaaaaaaaaaacacaatattgcaaactacatttatttaaataaattttattcagctccaatcgcattaaaatttgaaatcggttgatcggctaaagaaagtggcttgaaaatcactcgatcaaactctagtaaaggggagaatatcgaataaacttccgaattaattactgcttggtgcagtcagtcggtctaaatgacactgtttgttgttctatgtcatagccaaccaaaaagttagtctgcattatattaccataaagtggcagactattggtacctttaaaaacagaacatacaatatcctccgaaaccttcacaaaaaagttggaaggactcaatttcacatctgcacctctaaaatgtattgtaacttcaggaacttgagatagtgaattaaaactgtatcaaagttcccatgatcctttagggtctgcaacaggttgtgcctcaatcaaactggacattactgactacaattttgagttataaccttgtggcaataaggta

SEQ ID NO: 222 - DNA, 795 bp, Citrus
gggggcacactcaccaagcacgagccacaaacatattcattaagggttcaacttgaaatggcaaccgttcaagagatcagaaacgctcagcgtgccgacggcccggccaccgtcctcgccatcggtacggccacgcctgcccacagtgtcaaccaggctgattatcccgactattacttcagggtcacaaagagcgagcatatgacggagcttaaagagaagttcaagcgcatgcgtgacaagtcgatgattaagaagcgttacatgtacttaacggaagagattttgaaggaaaaccccaacatgtgcgcttacatggctccatcactcgacgcacgtcaagacattgtggtggtcgaagtgccgaagctcgggaaagaagctgctacaaaggtcatcaaagaatggggccagcccaagtctaagatcacccacctcatcttctgcaccacctccggcgtcgacatgcccggcgccgactaccagctcaccaaactgatcggcctgcgcccctccgtcaagcgcttcatgatgtaccaacaaggatgtttcgccggcggcactgttcttcgcctcgctaaagacttggctgagaacaacaagggcgctcgcgttcttgttgtctgttcggagatcacggcagtcactttccgcggccctgccgatactcatcttgattctcttgtgggccaggctttgttcggtgatggtgctgctgctgtgatcgtgggtgccgatcctgacacgtcggtcgagcgtccgttgtatcagctcgtgtcgacttcgcagacgatc

SEQ ID NO: 223 - DNA, 562 bp, Citrus
ctaaagtagcagctacctctagcactgcaaagctggacttattaaagagcttgggtgctgatttggctattgattacaccaaggaaaacattgaagatctgcctgagaaatttgatgtagtgtttgatgcagttgggcaatgtgacaaggcattgaaggcagtgaaagaaggcgggagagtcgtttcaataattggttcagtaactccaccggcttcctcgtttgtgttgacttcggatggatctatattggagaaattaaatccttatttcgagagtgggaaagtgaaagcaattattgacccaaaaggtccgtttccattctctcagaccttagaagcattttcccaccttgaatccagcagagctacaggaaaagttgtcatacatccaatcccatgagcggaaaacaaatgaatgctggatataatgtgtgtgactacctaaattatgtaatcgattagactatatgcttggcaataaataagagtgtggtcaattaattgtaagactaaaaagatgcttaagggatttttaatattctgttttaaaaaaaaaaaaaa

SEQ ID NO: 224 - DNA, 128 bp, Citrus
aattgccgatgtgactaaatggtacaaattagtccacctgtaatgtttcaattccttgtatttgctgttgaatatcaggaaatccgactgggtatctcattttttttcctcaaaaaaaaaaaaaaaaa

SEQ ID NO: 225 - DNA, 837 bp, Citrus
ggtcagtctctgatattttttttcccgtttagaaactcaatcacttcaaagttcttgttcgtttcctcttcctagcatattctttctcactccaatactttcttcataacaatatcttctctcacacttcatttacattttaaactgctctgtcgcttctgaaacaagcaataatttgtggaatcaaatggcggatgcaaaagcaaacggaaagaatgaggcggccaaactggcgaaaattccggcggctgcgaatccattggccaatgaaccatcggcgattgcatcaaatataagttaccacgtgcagtacagtcctcatttctcgccgactaagtttgagccggagcaagctttctttgccacggcggagagtgtccgtgatcgtcttattcaacaatggaatgagacataccaccattttaataaagttgatccgaagcaaacatactacctatcaatggaatttcttcaaggaaggactttgactaatgcaattggcagtttggacattcagaatgcatatgctgatgctttaaataatttgggccatgtccttgaggagatagctgaacaggaaaaagatgctgcactaggaaatggtgggctgggcaggctagcttcatgcttcttagactccatggcaacattgaatttgcctgcatggggttatggtttgagataccggtatgggctgttcaagcagaagatcaccaagcagggtcaagaagaagttgctgaagattggcttgagaaatttagtccttgggaagttgtcaggcatgatgtggtatttccggtcagattttttgggagtgttatggttaatccaaatgg

SEQ ID NO: 226 - DNA, 651 bp, Citrus
tttttttttttttttttacatgccaaagctattgctctaaatttattgcgtgtgattatacaatattcttatttcatgtaaatttattaattattttaaggtgaaaaaaatattctcaggtaatatggtgtatggttcaaacactggatttaatagctgagctataactcttgtcatactgcctaaaccaaagcatgactcctccgtattttggggaattcttaatagccggcaaaacctgaaatgtaagcacatcagggggaatatagccgctcccggctgcttcaggagaccctggcaatcccaaaaatacttggccaaaaccaaatagatttgatgtccattgattccaactgttcttgaaattatccgcattgccggaatactgacaaggaggattgttatagaattggacccaaacgtaatcaaataagccagttcctagtgcaccgccaagccatgcatcagggtacggacattgtggagctgctgctaagtaaaccttcttctgttggctaaaatttgacaaggccctggctagttcgtcccagtattggtttgagcctccctcaatatcgaaatcgattccatctaaaactgcatcacctaagggccgggagcttgattggcctccaagaaaatggtcccaca

SEQ ID NO: 227 - DNA, 914 bp, Citrus
ttttttttttttttcttcaaacctggaaattcttataaagatagaattgtttaagaaattacaacttaaaacttatctgacagagcgatgtttgagtaatcaaatgatggttaagacggagagacaagtttagttaatgatccccacagattgtggatttcctttcattttcttcccatcttaatacatccttccaagaaattatataacctattgcacatgaaatttttttgcacttgaatcatgctgtacggcattctgttatgttccagatttccttagcatactgtgcaattgtgcgatcactgctgaatttccacttttcctctccttgaatctaagaatcatatcctgaagtgaagcactgcagagaaagaattgttgtttcagccttaaaagcttcccttcttcagtagaatccccggggtagagcacagtacaaatctgttgagctcgagaatgaagctgtgcagcagattcgtattgtccatcattaaactgaaataaattgaaatcctcagcgctagctttagcgtcccagagacgaagactgatagtgttcttggttttgtaccctggaattggtatatcataagctacggcttggacaacttcacccccaacccattttctcgttccatttggattaaccataacactcccaaaaaatctgaccggaaataccacatcatgcctgacaacttcccaaggactaaatttctcaagccaatcttcagcaacttcttcttgaccctgcttggtgatcttctgcttgaacagcccataccggtatctcaaaccataaccccatgcaggcaaattcaatgttgccatggagtctaagaagcatgaagctagcctgcccagcccaccatttcctagtgcagcatctttttcctgttcagctatctcct

SEQ ID NO: 228 - DNA, 798 bp, Citrus
tttttttttttttttttacggatgggaattttactaatcattttactagccgaagacacattacattgatgggttcttttaatttcaactctccatacaaattctctaaataacatgatcacaatgtaaccatgcactgcatggtagcatgctatgtgaagccgtgtgggaggaacatttgataactcaaccgaaatgttgctgcattggatggccaaatcaaaggttgtgatgagtgtgattgaagctgggttggtggtgaggcgacggagccacggtggtgttgaaagagtggggtggcggcggcagaactccttgcggtggtaggcattggtagcacttagtaaagagcccaaatgtgtcaatttggtgtatgaaattagtcatgctcgcccacccgccaaatccaaacccaacaacaagcacccacactactacaaacacattgatcgtgtacgtccctacccatcttcccacaaactttggtggttgctccacagcattctctcttgcagcagctgatttgaaagtgaagatgtgggcaagagcagggatgatgtagacagtaaagctgacaagaagtgatccaacggttgagttgatggggccaaagaatggaaagactatcgccaaaaaccaaatggggatcaccacaggcaatcttgctgctgctcttttgcacaagctcttgcattcatgcatcccaattgctttctcccaaacaaaatacaatggtgtacatgcaaaaccaaatgtaataaactggtgaataagcattaaaatgacagccatgtctct

SEQ ID NO: 229 - DNA, 678 bp, Citrus
agtaatgggaaaggctcgtgtgataccggagactgttctgcgcaacttcattgccaaggcactggtggtgctcccccggctactgtggttgaaatgacacttggttcatctgcttcacctttgcatttctacgatgtgagtttagttgatggctttaacttgcctgtgtcgatgaagcctgttggtggtggaattggctgtggtgttgcgtcgtgtgatgctgatctgaacatttgctgcccgtcggcattggaagtcaaggtaggaggcaaggtggttggatgcaaaagtgcctgcttggctatgcaatcggctaagtattgctgcacagggcagtacgcaaatccgaagacttgcaagcctacactttttgcaaatctattcaaggctatatgcccaaaggcttatagttatgcatttgatgactcttccagtctcaacaaatgcagagcttcaagatatgtcgtcactttctgccctcccaaataacacaagggaaggtaagaaacttgtcatgacttgcacctgcaaggaagtacaaaagcataaggcagttctccgggaatcttagttgaaatttggattgtttccagtttaaatttctctttaatagatgacaggtttatcatggccttgtagggtaatgtactctgctctattgatagatggagtgtgatc

SEQ ID NO: 230 - DNA, 718 bp, Citrus
gggggtacacaaactcaatactcaaacaatttagactcaatgacagcattagccgatagcaagcccgtctccgttgaagctaagcctggtttggcaacggccttactatcagttttttcaagtggaccttattctccgaaactcaagacagtgaataaaccatggtttaatagttttcctccaaagccgttgaatattgtttatccagaagaaaaaggaacatatgaagttattttgttcttccacggcactgctctcagcaacacaagctattccaatctcttagaccacttggcttcccatggatacatcgttgttgcccctcagttatacgattttctgccgccgaaaggaaacggagaagttaacgatgcagcaaacgtcctcaactggttatcaacaggccttcaatcagaactcccggaaaatgttgaagctaacctaaactacgttgctcttatgggacacagtcgcggaggactaatagcgttcggtctggcacttggctatgcaacaaatcctccagttagcattaaaatttcagcattagtaggcatagacccagttgccgggttagccagcgttcatagtgaacttgaacccccgattctcagtcatgactcattcgagttctcaattcctgttactgtaattggcaccggactcggtggtgtgacaaagtgcatgcagccttgtgcaccggaaaacaaaaaccatg

SEQ ID NO: 231 - DNA, 899 bp, Citrus
tttttttgaaaagccaacattaaatatataaattaatcatgcattcaagctggaacttcaaggaaaggataatctgtgtacccaacaacaggatcaggaatgtaaaaagtgcttctgttgtacttgttcagaggtgcattcagcccaaagcgctttggcaaatctggatttgccaaaaataaacgaccgaaagcaaccaaatctgtattactctcagcaacagctttgttgccttcatctctactgtatcctccagcagaaatgaaggttccctcaaaagcgcttctcattggcaacaaactatgtacagtttcatacttatcattgattttgatcatccgcggctcgattacgtgcagataaagaagcctaaatttgttaagtgctttcgccatgtacaggccaagtgcttccggatttgagtctccagtttccatgtaactagcataaggtgatagtctcatgccaactctttcagctccgatttcgttagccacagcttcaactatttccaacgcgaatcggcatcgattttctaggcttccgccgtattgatcagttctgtcatttacttgatctttcatgaattgatcgatcaggtatccatttgctccatgaatttcaaccccatcaaaacctgcttcaattgcattacgagcagcaagtctaaaatcattgacaactaaggggatttcttcagttcttagaggacgaggaggtgaccaatctactccatctaagccaggtgtcacacccttacttgtacatgaaattggagcttctccatttggctgaaaacctgcttgttttaagttgtgaaaaatcaaatttacttttagcgagaattatttaaaactaaaattagctcattaaatttcaaaatattagcaaataagtaa

SEQ ID NO: 232 - DNA, 868 bp, Citrus
taaactttcccacaaaatggctccacttaacatgaaaaaaaatattgtaacctttgctcttgtgggcattcttgccctagcttttcccaccaatgtaatgtgtcaaaatgttgctaacattgtgactccccagttcttcgacggcataaagaatcaggcagccgcgagttgtgccggcaagagcttctacacgagagatgcatttctgaatgcggccaaggcttatcctcaatttggcagcggctctcctgaagtttcgaagcgtgagattgctgcattttttgcacacgtcactcatgaaactggacatttgtgctacatagaagagattaacaagtccaacaggtactgtgatgaacaaaacaaacagtacccatgtgttcccggaaagttctactacggccgtggaccgatccaactcaccggaaatggcaactacggagctgccggaaaagctatcgggtttgacggattaagagctccggaaacggtggccaaggaccccgttgtgtcatttaagactgccttgtggttttggatgaccaatgtgcacccagttatgaaccaaggttttggtgcaacaattcagaaaatcaatggtgccgttgaatgcggtggcaagcaacctgctcaggttcaagctcgcataggatattataaggattattgcaacaaatttggtgttgatcctggcccaaatctctcttgttaaaatgttttcgccgatacttcactggcttgttgaaataatgtggagtaatttaaataatatagggtggtttcatgtacctaaaacaaaataaattgaagaaataaaagggtgttgccgaccatattttattacttatatggtttgtgatttaaaaaa

SEQ ID NO: 233 - DNA, 593 bp, Citrus
tttttttttttttttttcctcaaaacttactactaatacaaattaataacaaagaaaatcagcccgaatgaaaggtagaaatgatcatctgagctatatgtacagcttgaaccaaagcaaccccagaagaaataagcacggccaatgtaacaagtgctataatccctaacgctgaacttggcctcaaatgcatcaaataattctgcaacaatcccacagcttctaaaacatcctgaatataatctgggtagtatttttgttcccactccatccaatgtgcaggcagctgctcatcacttgcttccgacaatttggtctctcgaatgcgcattcgcagcacgatcatgttctcgtccacaagcctgcctccgaaatgtcgtcccttatagttggaatttgatgaagatgagcccctattgctgcttgcagccatggccaggatgtagggtttcttgccacgtggcggcggcagcggggagaagagtgcttccgggcggcgaggaagcgtggcggaggagtagaagaaactgattgcttgcattgttgaagatttagttaggagccagctcaagaaataattatatgtgtacctc

SEQ ID NO: 234 - DNA, 918 bp, Citrus
ggggaatcagacggagaatataggcaaggcaaattagaaaggacggcattggcaaacagggcagccaccgcaggcgccgccaccattccgcttctcactccatacaaaatgggacaattcaatctctcccacagaatagtgttgcctccgttgaccagaaatagatcgtacaataacgttccatagccacatgccagtttatactactctcagcgcgctactaatggtggtctcctcattgctgaagcaactggggtctctgacaccgctcaagggtatccagacacacctggaatttggactaaggagcaagtggaagcttggaaaccaattgttgatgctgttcatgagaaaggtggcatcttcttttgtcaaatttggcacgtaggccgggtatctacctttggttttcagccgaatggagaagctccaatttcatgtactagtaagggtgtgacacctggcctagatggagtagattggtcacctcctcgtcctctaagaactgaagaaatccccttagttgtcaatgattttggacttgctgctcgtaatgcaattgaagcaggttttgatggggttgaaattcatggagcaaatggatacctgatcgatcaattcatgaaagatcaagtaaatgacagaactgatcaatacggcggaagcctagaaaatcgatgccgattcgcgttggaaatagttgaagctgtggctaacgaaattggagctgaaagagttggcatgagactatcaccttatgctagttacatggaaactggagactcaaatccggaagcacttggcctgtacatggcgaaagcacttaacaaatttaagcttctttatcttcacgtaatcgagccgcggatgatcaaaatcaatgataagtatgaaactgtacatagtttgttgccaatg

SEQ ID NO: 235 - DNA, 840 bp, Citrus
ctcttacaaggcttcttctatacatagatacattcaaaaccattgtcgatctccctcccaaaaattaatattgattttactattggcactttgagaattatggagtccaagcgccagttttcaataatcttgatcaaacttttcttcattcagtatctatcagttctttgtgctgcccggaacttcgatttcttctactttgtcctgcagtggccaggatcatactgtgatacagcgaagagttgctgctatccaacgactggaaagccagcagcagatttcgggattcatggactctggcctaattacaacgatggctcctatccatccaactgtgaccccactgcccctttcgatcaatcccagatatcagacctgcgaagcagcatgcaaaagaactggccaacactggcttgcccaagcgggaatggcataacattttggtcccatgaatgggagaaacacggcacttgctctgagtctgtgcttaaccaacatcagtactttcaaacagctcttaacctgaaaaatcaaatcaatctcctccaagctctcagaaccgcaggaatagtgcctgacgggagttcgtacagcttggaaagcatcaaggatgcgataaaagaagcaagtgggttcagtccatggatagaatgcaatgttgatgaatcaggcaacagccagctttatcagatttacttgtgtgtcgacacttctgcctctaatttcatcaactgccccgtctttcccaacggcaaaaaatgtggatcccagattgagtttcctccgttttagtgatcaagggatcaatcatcaacgtgtgtgattaatttcttcatcatg

SEQ ID NO: 236 - DNA, 799 bp, Citrus
tttttttttttttttttatccaccaaatcatcaagactttgataaacattcacaattttgctcaactgcacgtctacaagaaatagaaagcattatttattgttacattatacgactagtagcaacaaagtgcatcccacaaataccatcgatcaagtacataaattaaatataacactctcaaacaacacaaattgatgttcccataattttcaatttattttgcgacaattgtgtctaacttctcctttgccgccttccttcacatcaaccatgcccatcttcaccatggcctgctggaagtccaagaaaaacatagcctggttcatggcataaccgttgacagctgctctggttttcgcattcgtcaacagtgtttggtccgaaaacagaacccccgcttttctgatcagtgcattgaagtagagattgtcgaaatcgtttctggtggcgtcgaagggttgctccgcgttgtccccggcgctgcaagtctttgataacgtctttgcgaagtcggaatccaaggttgggtcgacgccggtcaaccgacttttgaatgatgaacatctggccacccctatcgtgtgtgcccctgataaaacaaccatttcttgagcagtgaagccacgctggccaaaggctcgaatgagctctgatgcgttgaaggtgggaaatggtagattgattgtgtcctctattttcgatctccttccatcctttcttccttttggtatgtcgtatattggacccccggcccaaaaaatagcatctctagcagccatagcaatgatatcgcctc

SEQ ID NO: 237 - DNA, 856 bp, Citrus
caacgagttactactttctccttcttatacttacttttgtcactgcaactcttgatcaagccaactcccaactctcaacaaactactacaaatccacatgcccaaaagcattgtctattgttcgggcagggattatagctgctataaaaaatgaaacacgcgtaggggcgtctttacttcgacttcatttccacgactgctttgtcaatggctgcgatggatcggtactgttggatgatacggccaatttcataggagagaaaacagcagttcctaacaataactcggccagagggttcaacgtggtggatcagattaaagctaatctggagaaagcatgcccccgtgttgtttcgtgtgcagatattcttgccattgccgcacgcgattcagttgttgttttcggaggtccttcatggaaagttagattgggaagaagagattctaccactgctagcagggcagctgcaaatacctccatccctccacccacttctaatttgagtgctctcatatcaagcttctcggcacagggtctctcattaaagaacatggtggctcttgctggtggacacacggtaggcaaggcaaggtgcacatcatttcgaggacacatttacaacgattccaatattgacaccagcttcgccaggtccttgcagcagagatgcccaagaagaggaaatgacaatgttctggcaaaccttgaccgtcaaactccaacgtgctttgacaatttatattacaagaatctgttgaacaagaaggggcttcttcattctgaccaacagctctttaatggcaattctgctgattttctggtcaaaagatacgctgctagcatctctgttttttt

SEQ ID NO: 238 - DNA, 728 bp, Citrus
gattcggccgaggcctcgtgccgaattcggcacgaggcggacgaagagacgggcgagtctccattcgttcagaagcccaaaacaatatcccagctcctactaacaacttcacccttcttcaacgaagttttgctaatcaaggacttgatttgaaggacctggttctgctctcaggtgcacacacaatcggggtctcccactgcacttcagtttcaagccggctgtacaatttcacaggagtgggtgaccaagaccctgctcttgacagtgaatatgcagcaaatctcaaggcaagaaagtgcagaactccaaatgataacactacattacttgaaatggaccctggtagccgcaagacatttgatcttagctactacaatcttttgcttaagagaaggggtctctttgtatctgatgcttctttgactacaaactctttcactttgtctttggttaagcaacttcttcagggatcattggaaaatttctttgctgaatttgccaagtctgtggagaaaatgggaaggaataaggttaagactggatcagaaggtgagatcaggaagcgttgcgcttttgtcaattagctaagcttggaggcatttcggtcttttttctactttttcattccattttctttttctccttgattttattttcttatttgggccgacgaacaaaatgaatgaccaagttttgcttttactgtgagaaggtcaatgatctcc

SEQ ID NO: 239 - DNA, 246 bp, Citrus
atcaagagtatggtacagccaaagtaccacacggaaatgtcaagtcatcaaatgtgttacttgacaagaatggtgttgcttgcatttctgattttgggctgtcactgcttttaaatccagttcatgcaattgcgagattaggtgggtacaaggcccctgaacaagctgaggttaagagactttcacagaaggctgatgtgtacagtttcggagtcttgttgttggaagtgctgacaggcagagctc

SEQ ID NO: 240 - DNA, 639 bp, Citrus
attcggcacgaggtaaatactatccatggaagcacaatcacaagaaaagcaaaacctggagcctgttatagaagcttcattaccaccatcaaatcaattttccggggataatttttccgagaagttgtctgagctagacactttggaatcattggtattatcgagcaaccacaacagaaaatttcccagaaaaattagcagcattcccactccttctgagagcagccaaaatactaaaaatatgagcattttttcttcagaagaaaagcagtcttgtgggttgatttctgattcttatcgacacattttgtcgaataaaaaaagaattacgtggactaaggatctgcatgaacattttgtcgagtgtgttaatcgccttggaggttctgagaaggcaacaccaaaggcgatactgaaactgatgaaatcgaaagaattgagtatcctacaagtaaaaagtcatttgcagaaatatcgatccgagaagctcatatcagaccagtctttacaaggatttcccgagaaaacagtttgtatcaatgatatacctcagctttacatgaaaatgagcatgcaaataagagaggcacttcaattgcagctagaactcgagaagcatcttcatgatcaattagagat

SEQ ID NO: 241 - DNA, 448 bp, Citrus
ctacagaacatgcggagaggaggaggtttactcttggggggattggttgggtgcagtggggttcaagccagttaatataagcttcgccaatcattgtcaagcaaagcttttattaggattatttaatgatggctatagagtggaggaactagccaacaataggcttgttttagggtggaaatctaggcgtctgctctcagcttctgtgtggacttcttctctcgattctaatttgtaaaaaataataataataatattattaataattagcttgctcatttttagttgcatcatttgcttctttggggtggcctatttgtattgtgtgtttgttagaactaagttatgggttttgaaccttctcagcaaaattatgaaccaaaatcttactaaaatgttgtaatttactcttcaatttgattttgctgattcgttttgtgttaaaaaa

SEQ ID NO: 242 - DNA, 871 bp, Citrus
ttttttttttttttaccacgaatcaacataaagttggattttctttgaaaagaaaaaaactttaaaaaaaaaaaagattaaaaaagaaaaacccatatttcatccacccaccaacaacaaactcaaaacaaacacccaacaattttgtttgctctccaaccctcttaatgatcaccactacttcaaacactataattacaagaaaccgaggttgttgttgaagaaaatggcgatgatgcatttgaagaagtcgaaaaagccgacagcagcctcgagacaactaacttattaccattttcctcttcctcctcctccatgttccccgtgtaattgtcgttgccctcgggattattttcattaatgtacttcgacacttcttctgcttccacatcgaaaatgaagtctatgttgtcctcgaacaaccccgtgttatcgaacaagtccggcagctcaccggcgtttcccattgggatatcgggaaacgttagcggagttaaccctaccgccgtgtccaggcagaaactccatgttagctcgtgctcgtcagtagccgccatagcacaactcgcgtccatcatgcatgaaggaagttgtgtgttttgctgaagtacttgctgatgaggtgaaactatttcttcttgttgcggtaataatgctggctgcgtttgctgctgctgttgttgttctggttgtggttgttcaacttcgacttctgcttcggtttcttcggattccatcgaggaattcggaagagggaaaattcctttcttcttcaattgatcaatgtaatgactaaagtcaaagttggtcactgcatttgcacctctatactcaattgccgccatgtcaaatgctgccgctgcttcctctt

SEQ ID NO: 243 - DNA, 847 bp, Citrus
ttttttttttttttaacccctactggtaaatggccctaaagacgattgaaaggctgttctgcaggtcttttgtctccatacaaccaagtgggcagtacaaagccaaaaggaggaaaaattttctgccaattgtaaaccatttggtccccagggaaaatgtgaacaacaattttgaatttttcatacttgactagaaagatatgagaatatacctgtgaatagatgaaggtgccgagtattgcaatggcggctccaagagcattgacgggttgaactggcgtgtggaagatgatgatggaggagactatgacagagattcgcttcattgtgttgccaatgctgaatgtcaatggagaaatttgatcgagagacatgtatgaaacttggttgtacaagtgatagaagatactctgtgccgctacccacctgtgacaatccagagtcacaaatttatcttagaaaaacattgaggaagttaacgagtgctcattttgggaccacacgactaaaaattattaaaatctataatgtttcaaatcaaaatggaactttttctgatatcaagcagacaggaagtatctattttcttcaattcttgagaaatatcatgcaaatgcatctaaaagcagataaatctacctcccatcacaaaacaaaaataataaaataagacaccagagttttggagctgaaattctaatgaacaaatgatgagaaactatttggcctataaaccattcgacaaaagcaattttaattaataaaataggcaattttagttgagaaaaattaagagcctaactgtctgtcatctgcgcggatgcaaatgacacttaagcataactac

SEQ ID NO: 244 - DNA, 586 bp, Citrus
cccccgaggctgcaggaattcaggcacgaggatccttttataatatatcaaaacaagtgttacccacagataattaacccttaatattatattttacatgaaggcaattacgctttaagttgcaataagtcatgaacaagtttgcatttcgtaaaaacaggaaggcgaaagcatggctgtgaattttaggcccatttagccaagagagacatgcaacctgagcctaaaagaagagaaaaattagctccaagctgcaacttgaaattggtttgcaacttaggactcataaaatccgttgcaagaagatccacaagcgccatatagatcaagattccagctgaagcagagttgaaaatgccttcaataacaagagctgttgggctattctctttgtaaacttttgatatcccaatcccaattccaatcccgacgggagtggtcagggaaaagaaaagtatcattgccgctacggcttttgacttgaactttgcctgagagatgcatccaccaaggcccatgccttcaaagaactggtgaaaagttagtgctgctacgaggggcttgattgtctttacacttccggaag

SEQ ID NO: 245 - DNA, 775 bp, Citrus
tttttttttttttgaatgaataaataactctattaacatcattacagctcagtaactcatttattcttatttacaacaaaggcattaacccacaatctgctctcgggtgaaaaaaaaccttgtacacttatctggctgcaagcatcatgagaataatatagatactactcttgattacaaggaataaaagcatcattccgtccactgtagccgcgtctttttttttttcaatcaatcttctgtcaaacttcgatgcgaatagttccagcaaaactcatagactatgcggcaaaaccacctcaaaatccttcacaccttcactgctttgcctgtgaatagatgaaggtgccgagtattgcaatggcggctccaagagcattgacgggttgaactggcgtgtggaagatgatgatggaggagactatgacagagattcgcttcattgtgttgccaatgctgaatgtcaatggagaaatttgatcgagagacatgtatgaaacttggttgtacaagtgatagaagatactctgtgccgctacccaccacacgaagttgggaccaatttgagcaatagccttttgccagccagcagcccacatctgagggccctccacagcaattgcaaatggtgtgagaatcaaaagagacatcatagacaaacaagcataatagttcatcccaccaacagactttcccttcatccctttcttggagaaaatgttccgaaacacgaatgccaaattcgatatcatagctcccataaatccaatcatgt

SEQ ID NO: 246 - DNA, 632 bp, Citrus
cagaactaacctatgtccactaattgaagtgtgacgagaatggtgaattctagcatgaagacttgctttgtcgctttgtttgtgttcttgctggtttctgaaactctgattgaggaaactgatgcggcaggagagtgtgggaggactccgatacggtcggcggcggcgagcttgaccccctgcttgggtgcggcccgaaatggcagggctaagccgccgccaatatgctgctcaaaactcggtgctttaataagaaccgccccaaggtgtctttgtgccgtcttattgtcacccttggcaaagcaagctggaatcaagcctgccattgctatttcaattcctaaacgatgcaacctcaggagacccgttggaaagaaatgtgaaaggtacacaattccatgagaatatcagaggcccattaaatgctatgaatgggagagtgcgtagttaacaaataaataaatggtccttgggcgggtttatccggcggcccatttgggctctagtagtagttatttatgctttataaaagacttactggcttcttgcggaggctgttgctgcttaaattaaggatttgttccttctgcgcttgctttattactatctgctgataataataataaaaaata

SEQ ID NO: 247 - DNA, 577 bp, Citrus
gttttttttttttttttttgaaagtaatttattattattatttttttaaacatgataaacaatcccttggatattaggatagagtgatgctaaacttttcaacgaatattttaacttttacaatcttaaataaagtgacattcgtttattggccgaagagattaagcactaaatagctctaaacttgcaatacttttgcggatgttaccggaaactgcaatacggtggaaggcaaatctgttcctgtcttaagaatgaacaaggcaggaggggcagagagcctccgaacaaaaatttattgtcttggattgtcagagcctctttcggtgaccactggtgaatgaaatgcttctcctattgtaaacatttgattcggttcaatttcgtttgttaagctatggccttcaattcccagctaaactggaactggacctctgggtgtactctgcaacaagttgtgaaaaagaggatgacttgttctctagcaactttcttggggaatcatattcctcgatgagtccatgactgagaagcagaaccatatcactgtcaataacagacgttatccgatgagcaa

SEQ ID NO: 248 - DNA, 691 bp, Citrus
  misc_feature (608)..(608): n is a, c, g, or t
  misc_feature (632)..(632): n is a, c, g, or t
gtaatttgaagcacttttctttgtttgttacaaggcaaggcaagcaaagcaaagcaaagcaaagaatctgtttttgcgtaaggaagctcctctgcagcttctgtgctaccttaagcttccattttctttattagtataaattcaccccctcacaacttgtaagtgacactttcgaaacacctttcaagcttctgttggttctcattctcacaatattttctcacaagtttttctcagaatttttcattgataccccagtaggtgaaaaagtcttaaaaatcagaaaatgggagttggggggactttagaatatttatctgatttaatgggaagctctggccataagcacaagaagaagaagaagcaattacaaactgttgatcttaaagtcagaatggactgtgatggctgcgagcttaaagtcaagaacgctctctcttcactaagcggggtgaagtcggtggagataaacaggaagcaacagaaagtgagtgtgactggttatgttgaagcaaacaaggtgttaaagaaggcaaaatcaacagggaaaagagcagagatttggccttatgtgccttacaatttggtggctcagccttacattgccngtgcttatgacaagcgagctcctnctggttatgtcaggaaagttgaaggcacagcaacaatgccagtgtcactacacttgaaa

SEQ ID NO: 249 - DNA, 657 bp, Citrus
aactagaaaggctccaatccttcatcacttctcagaatccatcgcaggagccacaacaattcggggttttaatcaggaaaatcgtttcttgctgaggagtcacagcttgattgatgattactcttgcgtcaccttccacaactgcggaacaatggaatgattatgccttcaaattaaccttcttttcaactttgctttcttccttgtgctgatcattttggagaccttgcctaggtcagccattgatcccagcgtggcaggattggcagcaacctatggattgaacctgattgtacttcaagcttgtgtgatatggaacctgtgcaatgttgagaacaaaatgatatccggtgagagaattcttcagttcacaaacataccaagtgaagctccccttgtgataaagaatagcaggccatctcctgaatggccaagcagtggaaaaattgaacttgaaaaccttcttgtccaatataatcctaccctccctatggtcctgaaaggaataacttgcacctttcctggagaaaagaaaatcgtatttgtggaaagaacggggagtgggaagtccactctaatccaagatctcttcagggtagttgatccttctggaggacgaattctgattgatggagtagatatttcgatgataggttt

SEQ ID NO: 250 - DNA, 667 bp, Citrus
tctcgagcttgtaagtccatttgattcattctaaatcgaaaaatggaggcctcgcatgtagcagccatttgcacattggtggttcttcttctggcagctgaaacacaagtctcagtggcagtgacatgcagcccaacccaactgagctcttgtgttagcgccatcacatcttcaactccaccatcaaggctctgctgcagcaagatcaaagaacagaagccttgcctttgccagtaccttcgaaacccgagcctcaggaagtttatcaacaccccaaatgccaggagagttgctagcacttgtggcactcccttcccaaaatgttaaatttctctttgctgcattaatctcgtttaatgcatagtctaatatcgagtggtgattgaagagaattatgagttagtagtttaattgtgctgtgttttatgttgttgttgttgttgtgatacttgtggaaacaatgttgggggtcatgggttacatcacatggcaccaacatctgtcttagctagtgtgttctgtttgttccgaaggcactacttattatttataagggaaatcactattgtatcgtcttcctttctttgtcttgtatcctttgttatttgcaattttatttgcagtatatctaatcaaatcagtggcaatagaaaaaaaaaaaaaaaaa

SEQ ID NO: 251 - DNA, 452 bp, Citrus
gatgggtcatataacatttttctggggcacaaatactgagattctattcccaggatggccaggcgagagcttcagttgctacatattagctttaatctttgtgttcatgatctcactgacagtggagtggatctcgcatgcgaaattgatcaagtctggcataagcaatgtcgcttcagggattttgcagactctcatgtatgccttcaggattggactggcctatttggtgatgcttgctgtcatgtcgtttaatattggtgtgttgcttgctgcagttgctggatattcagttggtttcttgatttttgggagtcaggtttttaggaataatcttaagattgaaccttaccaggatttatcagatcttcctcctctgaattgctaaataaatgttaagtctgtaatatcaatattctggtgtgtatgcagtgattaacttttgaaccaaa

SEQ ID NO: 252 - DNA, 542 bp, Citrus
gcaaagctccattaatacagcattttgcagaaactgtttccgggtcaaccactatcaggagctttgatcaagaatcaaggtttatagacacaaacatggaactgatggatggatattctcgaccaacattccatgttgctgctgccatggaatggcttggctttcgcctggatatgttgtctaacatcacatttgccttctctttggttttcttaatctccattccgaagggatttattgatccagcaattgctggcctagctgtgacatatggactcaccctaaataacttacaagctatgttaatatggcttgcttgccaaatggagaacaagattatatcagttgagagaatttttcagtatacttgtattcctagtgagcccccgctcgaaatagaagaaagtcggcccaaccattcttggccatcacatgggaagattgacctgcgtgatcttcaggttcgctatgcaccacacatgccctttgtgttgcgaggtatctcgtgtactttcccaggggaaaagaaaactggtattgta

SEQ ID NO: 253 - DNA, 831 bp, Citrus
gaggggctaacaagccaaaatttactaatttcatattttctctttgaaaaaagagaaaatcacgttgcatgagatttagagttaaattttgataaggctgtcccattaactaatggaactaggccttggtctcaacctatcccccaaagtatcctcgtcaaattcttgattattatcacacaccaaaatttacaaatatttagtccaactacttgtctttcaagcagaaatgtccgacaagtcgttctggtgtttctccttttgaagtgaaaaccgacatgcatcaattgcatcttcaattgacaagaaaaccgaatccttcccaatgacgtcgatgaactttgacagtatcattttatccataaccccaatcctgggatttattaatttcatcttaatagattttgcttccaaaattctgagtatttctctaaatgcggcaattcctgtcatgtctattgttgaaactcctgacaaatctagtaaaacatgctcaataacatccggcttggaatttgataagacctgttcatctcggatccatctcaaaaccctttctctaatgtaattgcaatttgcaaagtaaataggggaaccaagttgcagaattaggattcctgggaacccttgtgcatgctgatactgctctgtatccaggtacagattcgagtctgagatttttccaagcttgcaagtagcaggccttgccacatatataagcgtccgaagtaaagcaagccccacggagagcatgaggccaatgtccatgcttatgaaggcgaccccaaggaaagctgccatgcaaatgctaaaatctagcttatcaacttt

SEQ ID NO: 254 - DNA, 802 bp, Citrus
tttttttttttttttttgaaaaaatactgtttcttatacatccatattttattcaatactatagaacattgatactttatttatttctagctatctactattcattgtttggttggatcaacaagctcaagatcaagatagggtttttgatcttctaatgattggataccactcttataccggtaacgacgtgcacagtacagaaaatagacaatgttaaggcctcctaatcctgcaataaggaagtagaaataatctaatcttccagcatcgatgtcattagtcaaccagtcggggtggccatgccttgctgtgactccatgcacaatggtgataagcaaactgctcaagtaacttgcaaatccaaaggagcaaaagaggagagaattagcaatacttctcatgtggtcaggaaactgcttgttaaaaaattcgatctgtccaattatgttgaatgcctcacaaaaccccatcaggataagttgaggagctagccagaagactgatacttgtgacatagggtgcaaatgggcagaagcccttctccctctttcaactaaaccagcaactatcatggacagtattgaaaaaatcatcccaattccaattctctgaagaagtgtgatccctccttcatgtttagtgattttgcgaagagctgggacaagaactgtgtcataaaatgggagccagagtcctattgtgatcattgatatgacccccactgtacctggagggatttggaacttaggcccaaggtgtctgttcattttcatggcctgtgaaactgtgaatgttcctt

SEQ ID NO: 255 - DNA, 714 bp, Citrus
tttttttttttttttttaccccccccatcaagggccattggaggcccccttggatgttattattacccccctttgggcaacattgtccacaaaattataaatatttgtcccaacaaaggatatacaaatcaaaaaacaagagcgaaataggtaactatagcaagttattgggaaagtacattgtttcctcccgaacataaacataacaatccagcagcaatacaattccaagctcgcacgcatcaaatccccttatactacccacataaaatgtaccctaaaaagcccaaacttcaaaaaaaactgactgccatgcatttcaaatcaaatgcgtcaaagggaggcaaatctcttttcaagatccccaacatcagcaaattcaaaactagtattggtcttaggaacatttgcaacagcgttaggagcattccttgatgcaatccgaccttttggagctgaaaaaaactgaaatgcaatatcccccccaatctcatcaagcacctggttagaaagttcccctgtttcctcttcagccccgtctttgtctaaagtttcatcaaaaaactctgacatcatctcaatcgtcatatccatttgggccgactgcttctggaattctttaatcaatttagcttgttttgcaggtttcatttgcgggttcattgccaccattgccttggttgcccccctcattcccgtaaaaattgaagtact

SEQ ID NO: 256 - DNA, 895 bp, Citrus
tcctgctttgtgactctcagtgtcaccactactttttcttgcttttctcttacatttcggtcacatgaaatagctagcagctcttattcacttgctttaagttttatgttcatgagcttgactgttaattgctaaacgaacaaaatctcacataatattctgcttttagacttttatatagaatttaagagatgattctgtcaaaggtgtagcttatcacatggcaagttctctttgttattgtgattacagatagcagtgcctttccatactactgtgcccttcaccaaatattgttgactgtctggtttatgtagacaaatggttctttccttcttcatctttttttccccccccaattattctgtccttctttgcttcttaataataagtttcatcgggttctgtgcatgcttttgattctctcaataaaagttgaccattttaattagatgcactcacactcactcctatattatattacattgcacagataaatttcccatagaaattgatttgttgccacaactctttctattagttgtaggtatgggcatgttgtagtacttgatcaagtgaggagggccagatttcgcctagctttagatttgcttttgtggggttaagaagatttggctgacatgggaaatctcagtcttggcaagatattagactgcctttgcatttcttcaccagggtcatgctcttgtttttgccttaacacctttgaaggtcaagatgagtttgagaaaaaaccactcatgaagagtgatggaggccagttgctgagattgaaggatgtcgtttctggtaaccagaccttggcctttcagttaaagcctaagatggtggtgctaagagtgtccatgcactgcaatggctgtgcaagaaaagt

SEQ ID NO: 257 - DNA, 605 bp, Citrus
ttttcgatcattttagatcaaagacgaaagctttttccggttcctttttgcatgcggtttctgattcgatgatgaagtcgagctgcgagtcctcggaccgcgaagactgccgtgacgacgcggcggcctttaatctcaaattcgtcgccatagcctccatcctcatttccggaatcgtcggcgtcgccattccgttaattgggaagcaccgccggttcttaaaaaccgacggcagtctgttcgtcgctactaaagcgtttgcggccggtgtcattttggctacgggttttgttcacatgttatctggaggatccgaggcgttggataacccgtgtttgcccgaattcccgtggtccaagttcccgttccctgggtttttcgccatggtggcttcgcttctgacgctgcttctggacttcgtggggacacaatattacgagaggaaacagggcctgacccgggctaccgaggagcagggtcgggtccggtcagtggatgaggactcggattcgggtattgtcccggttctggaaattaaggaccggaacgtgaaggtcttcggtgaggaggaaggtggaggcatgcacattgtggggatgcatgca

SEQ ID NO: 258 - DNA, 687 bp, Citrus
gcagctcttcagttggaggagaagaaattggttgcagagatcaagaaaactgccaaaactggcaatgaggctgccactagaatattagcccgtcaacttgttcggctacgccaacaaataactaatttacaggggagtcgtgctcaaatcagaggcgtagcaactcatacacaggctctatatgctagtacttcaatttctactggaatgagaggcgcaaccaaggcaatggtggcaatgaaccagcaaatgaaacctgcaaaacaagctaaattgattaaagaattccagaagcagtcggcacaaatggatatgacgattgagatgatgtcagagtctattgatgaaactttagacaaagacgaggctgaagaggaaacagaggaacttactaaccaggtgcttgatgagattggtgtggatattgcatctcagttatcttcagctccaaaaggtcggattgcatcaaggaatgctcctaacgctgttgcaaatgctcctaagaccaatactagttctgaatctgctgatgttgaggatcttgaaaagagatttgcctcccttcgacgcatctgatctgaaatgcatggcagtcagttctcttcgaagtctgtgctttctagtgtacattttatgtgtgtagtataagtggatttgatgcgtgcgagcttggaattgtattgctgc

SEQ ID NO: 259 - DNA, 487 bp, Citrus
tttttttttttcttcttttgttgctgccggtgctggtgttggtgttggtgttggtgttgttttagcactaaactcatgcttgttaagcgcttcttgaacaacctgcttaagctcgtctagcgctttcttctcattatccggaagatcacccactctagtgctttcttccttaaaagaaccagactcgggcaccttctgctcactctcagcatcgtcaccactgctggatttcggagtctcagtctctttattagaagcctcatcagtctccggcaatgtcaccggtgcctctttctctaccgccggcattgcagtcttctcagccggctgcacatgatcagtttgaaccaccacctcttcaacttgagcagctgtctcttgggactctgtcttttgaacttcctccgccatagttgctgctgctgctgctgctgctgatattaattatttctaattaagagcccaaccaaataaataaagaatcctc

SEQ ID NO: 260 - DNA, 841 bp, Citrus
accttaaattaatttcagtttctttaattttcctctcctcttagcttgtttcccatcatatatcaatatcatggcttgtaattctgtcaacatcttgaagataaaaacacttgctttcattcttctttatcctactctagtctttggtgagtgcgtttgtgatgttgaagctatgagtcaagataataatcaacaagaagcgcttaaatataaagtgattgcaattgctagcatacttgttgctggtgcttttggggttagtcttcccttgttaggtaagaaggtcccagcactaaggccggaaaatgatactttcttcatgattaaggcctttgctgccggcgttatcctagcaaccgggttcgttcacatactgccagatgcatttgacaacttaacctctccttgcctcgttgaaaatccatggggggattttcctttttctggttttgttgctatgatgtccgcgatagggactttaatgattgatactttcgcgacggggtattataagaggcaacattttaattgtaagcctaataagcagcttgttgatgaagagatggccaatgaacatgctggtcatgtacatgtgcatacacatgccacacatggccatgctcatggctccacggattcatcatatcaagaacttgctctatcagaaataatccgaaaacgtgtcatatcacaggttttggagttaggaattgtggttcactcaataattattggaatatctttgggagcttcggagagccttgatacaatcaaacctcttctagcagccttgtcatttcatcaattttttgagggcatgggacttggtggctgcatctct

SEQ ID NO: 261 - DNA, 942 bp, Citrus
ttttttattcaaataaatttcattatgaactaattagctattagacttatatttacagatcgagctaagaaacttatgaaactaaacaaagataaaagaaaatattaacagatagagaattgattatggatttgtgattcatgaagctctttgcttgaaaagcagctgcgtgccagaaacgggaatgcacttgaagagaaaaccaattggccaagacatagctgcaatgccaatacaagctgcccattgcccccagttcagcctctcagtatcagcaaacttcttcagaaactctaccattatgagttgaagaacaatggtaattccaatgattgctagaaacaacttgttcttgtgtatccctttgaatatattcttcttctcaagtttcctagcattgaactcattgaagatttggcagaagacaaaagtattgaaaatcatggtatctttaacactttcattcacgctgaagattgatcttcctttaaattgcagagtcagtaagatggtcacctgataaatggcctgagggatgagattcctccacatgagttttgttatcagaggctcggatcggccaacgggaggctttgacatgagatcattggcgggctgctcagtggccaatgccaatgctcctagtgtatccattatcaggttcacccagagcagctgaacagcagttagtgggacttttcctgaagaaacagcagcaacaaagttgatgacaagagcagcaacattgactgtgagctgaaattgaaggaatttctgaatgttgttgtagacacatcgtccccatctcagaactgtcactacagaggtgaagttatcatccataatgacgatatctgagctctccctttgcacttcagttccttgaattcccatcgagagtcctatatctgctgcctttagagcaggagcatcatttgtgcc

SEQ ID NO: 262 - DNA, 834 bp, Citrus
tttttttttttttttttatgtacaaggaaaaattacaaatccctccatgtttaagttacaaagattcacacccaaaatcaaatgagttatgacacttaccctctttaaattttaaaacgctacacttaaccctaatcaatttaagttattttacagatagtaaacatccatcaaaatgtctgtacaaaaactgccgcaaattaaactattggataaacaaaaattgccgaaaaaatctctatgatttttaagcccatttggctaacaaggacatgcaaccagctcctaaaagaagagaaacatgtgctccaaattgaagccttttattggcttgcatcttcggattcataaaatctgcagcaagaagatcaaccaaggacatgtatattaggattccagctgctgctgcgttgaatatcccttcaacaataagagcaggggggtcattttcgtcataaaaacttgatattccaatgcctattgctatcccagctggggttgtcaaagagaagaacaaggccaatattgcgactcctcgagacttgaattttgcctgcgtaatgcaaccaccaagacccattccttcaaagaattgatgaaaagtcaacgctgcaaccaaaggcttaatagtttttggactctcagaagtacccaatgaaattccaatgattaccgagtgcacaagaattcccaactccaaaaccagagatatgacacggtgtcgtagaagctccgattcaccagcatattcaatagatccatgagcatggccatgagttgcatgagtatgaacatgcacgtgacctgcatgctccccaactttctcttcatctg

SEQ ID NO: 263 - DNA, 854 bp, Citrus
ttgagatggaggctgaggctgatggagcagggcattcagaagcttgatttcaagcctggtggcatttcttcgttgcttcagatcaatgatttgaagaatgctccagtattagcaaagaaggaactgagggttgccacaaaacaagctgtcgatctattgcagaacaattaccctgaatttgttgccagaaatataattattaatgctccattttggtactatgctttgaatgctctcatatcacctttcttaacgcaaagaactaagagcaaatttgttgttgctcgcccggccaaggtcacagaaacacttctgaaatacattccagccgaggagctccctgttcaatatggtggcttcaagagggagaatgatttcgagttctccaaagaaggtggtgctgtttctgagattactctcaaggcaggatcaactgaaactattgagattcaagctcctgagattggaactacaatcacttgggatctgactgttctgggttgggaagtgagttacaaggaggagtttgtgcctactgatgaaggctcatacaccattattgttcagaaaggaaagaagatggggtcgcatgaggggccaattcgcaacaccttcaagaacaatgaagctggaaagcttgttctcacaattgacaatgcctcaagcaagaagaaaagggttctgtatcgatacaagaccaagaacttctcctcttgaaagtttaaactacacaattaatctatctatttactatgttttgtccaaattctgcataacttcggggatcattaaaattcattgttatattttctatctactaaattattcttttaggctgggaaattaatgggaga

SEQ ID NO: 264 - DNA, 565 bp, Citrus
tttttttttttttttttacatttctcagcctcctgatgagaaattgtcaaattgccactaaattttacaattgtggtggcacatcacatcaaattgccactctacataatcaaagcttgacaagataaataaatagatagatttgtttggattgaaatattcaaaattaatttaagcccatttggccagtacagacatgcaaccagctccgagaagaagtgaagcattagctcctaattgaagcctcgaattgctctgcagtattgggttcataaaatcagcggcaagcaagtcaactagtgccatgtatatcaaaatcccagccgaagctgaattgaaaatcccttctacaattagagctgttgggctattctcttcgtacacacttgaaattccaattccaattgcaatccccactggtgttgtgagagagaaaaatgttgccataattgccattgatctagacttgaattttgcctgagagatgcagccaccaagtcccatgccctcaaaaaactggtgaaatgacaaggctgctagtagaggcttgattatgtcaagatct

SEQ ID NO: 265 - DNA, 713 bp, Citrus
gtggtagccagcttagctcagctttgctagctaactagctagctaggtgtttaaataatcgagatttgatatcaagcaaaacaaaagaagagtgatcagagatgggattctggacgttttttgaggtggcttccatgccgattgtacaagtcctcttaatcagcattttgggagctctcatggccactcaatattggaatctcttaaccgccgacgccagaagatccttgaacaaggtggtgttcaccgtgtttacaccctcactcatgtttgcaagtttagccaagactgtcacacttgaagatattatctcatggtggtttatgcccgtcaacgtcgcgatgaccttcttgattggaggaattcttgggtggatagttgtcaaattactacgaccaaagcctcatcttgaaggcttggtcatcgctacttgtgcatcaggtaacttgggtaatcttctccttataattgtccctgcaatctgccatgagcaagggagtccattcggtaaccgtgatgtttgcagctccgttggactctcgtatgcatccttctccatggcgcttggcggcttcttcatatggtcttacagttatcaacttataaaacaatcgtctgttaggtataaagcacttgctcaggcagctgagcctgaggaggtccccaaagaagtcaacaaggactttgatgccaatgctcaaactcagcttctc

SEQ ID NO: 266 - DNA, 878 bp, Citrus
ttcctctcagactacttcttcatctctctttagttcagtactattattgtttttttttttgaaaaaaacagtgtctctgtttcctcagtaccacaaaagagtgactattagtctttttctctttgacgaacttcgcttctcttcggcattgcttcacttttgttgttattaccaacacatacaaagcatacactcgcagagagatagagagagattccatctgggtcttactcaaagcacccattaatggaagcagtaacagtaccagagtcatcaccctcacccatgtcccttcagcaacccaaaaccccacccccagaggcctcacctaaaccgtacaccagtaccaagaaatccttcgtcgcttctctgatggaagccgccactcttcgctctccttccttcaaagaagactcttacttcgtctctcaactcaaatcctccgaaaagaaggccttacaagagctcaagaacaggcttgccgactcccacaacggctctggtgaggacgaatgctccatgtgggggattccccttctgggtaccggtgacgaaagagccgatgtgattctgctcaagtttctgagagcaagggacttcagggttctagattctttcaacatgctggagaaatgcttggcttggagaaaagagtttggagcagacggcatcgttgaggaggacttggggttcaaggaactcgaaggcgtggtagcttatatgcagggttacgacagagaaggccaccctgtgtgttacaatgcttatggggtctttagagacaaggatatgtatgaaaggatctttggggacgatgagaagctcaaaattttttgagatggagagttcaggttttggaaagaggcatcaatctcttg

SEQ ID NO: 267 - DNA, 546 bp, Citrus
gccctaattctctcttcccatgcacaagactcaccccaagactatgtcaatgctcacaacgcagctagggcacaggttggtgttggccctgtgacatgggacgacagagtagcttcctatgcacaaaactatgccaatcaacgtaaaggcgactgcaatcttgtgcattcgggaggaccgtatggcgagaaccttgcatggagcagtgctggtctttccggcacagatgctgtgaaaatgtgggtgaatgagaaagctgattatgactacaattctaatacttgtgctgaaggcaaggtgtgtgggcactatactcaggtggtttggcgcaattcggttcgcattgggtgtgccaaggtgacgtgcaacaataataaaggaactttcatagggtgcaactatgaccccccaggcaactttgttggggagaaaccttactgaatattatatataaaaataaagctttgtatgattaagtagcttgcaacaaatgcatggatgaataaggtttcaatttgatggttattaactgacgaatttgaatac

SEQ ID NO: 268 - DNA, 706 bp, Citrus
tttttttttttttttttgaaatggaaattatgcatcttaattcaagagcagcaaatacaaagtacaatgcacaagaattaataaatccttagttaggctgaagttgatgacgtagtatcaaatgattttctcctaaccaaaagggaagtgatctttaatggctgaacatgagtattattatcaagtgtacacaacacaagatccggccgatgaagtgccagaaccagctgatcttcaccaaacaccaaaccagttgcatcgagcaaaacatgccatgcatttctgtgagcttcaaaaatccaatgcataaaatatctagtgccattcacaaccaccgggtacgaaaaaagtcccttgggcgtgtacttgcacttccttctgaaattttgactaagttgtgaccctttaattctcaaatccagccaagtctctggggccgcaatgacctttgattctttctgagctgcaaatcctttgatgtaatcggattcttcaaaaatgattgtcaagtagtaatttcctttaaagaaagggtagctttctcctatcattagcatagcttctttgcaattgggcacgaagaggactaaatactcatcttcactcaatccgcaatgctttagtgcccgatttcgagcttgaatttccgggattgaaatgaaattcccttgaaaggaagttttcttggagagaatatctaaccctc

SEQ ID NO: 269 - DNA, 769 bp, Citrus
aattcggcacgaggaagccacaaaggatagctggaatgataacaattctagatgatgttaaaacaaggattcaaaagtctcaacctgttgccaagagatcagtcgcggagctcagacgatgcaacacagatcttaggcctaatcgtgcgcctagggacaaaaagctttgtgaaccaataaccgatgacaaagaaaagttgagaagacagctcagtgcaagcttggctgcaagaaagagcttggaagttttgtgttcgagcttgggaaaggagaaggaaattatggccggggagctggctagaaaggttcatgaattgaatgaaatggaggaacttatcaatgactttaaagcacaaaatgcgtcattgttggcaaaagtacaaaattgtgcagccgagcacaaagagaagaagtgcagcgcaggggagatacaggggaatgcagctctccaagagcgaaacaaggctctttcggagcaccttttgaagtcccttgatgggtatcgatcattgaagaagaagtataaatatgtcaaagaagaaaatacagccatgcgcgcgacaatggaggaactggggaagaaagtagaagctggaattgatcaaatacttggattcagacaacgaatagcgacaaaggagggacaagaggtggatatagaagaggagattacagcattagagggtatgtttgatagcttcaaatatgagatcaaaagcatatacaaataaagtgattgtgggtagccaagcaccatcatgcagcagcc

SEQ ID NO: 270 - DNA, 661 bp, Citrus
gagcactcaaagattgggttcaagccgctggaggggctgtcgcagcttttgatttcaccacgaagggtatcctccaagctgctgtgcaaggggagctgtggagattaaaagactcgaacggcaagccgccaggattcattggaattttaccacaaaatgctgtgacttttattgacaatcatgacacagggtccactcaacgtctgtggccattcccatcggataaagtcatgcttggatatgcttacatcctcacacatcccggcaccccttgcatattttatgatcacttctttgactggggtctgaaggaggcgattagcaaattggctgctgtcagaaataggaatgggatcaatacagcaagcagagttaatattttagcctcagatgccgatgtctacattgctgcaattggtgatagagtcattatgaagattggaccaaagatggatattggaaatcttattccttctgacttcaaagtggctgccgatggaaccgactatgctgtctgggaaaaaaactgaactcaatgaagattttattttcaagttattagaataataatgttctgaaaggctattgtttaacacgtaaaagagctcttgtgagaataaaatgcaaatattctgtatttatgtaaaaaaaaaaaaaaaaa

SEQ ID NO: 271 - DNA, 399 bp, Citrus
aaagaatcatctcacagagtgagcgaagtgaggtaactctagtgtagaagagaatacacatggccacctctcgcagctcaattctgttgttggtgtcaattcttcttttgatcacactctccaatgtggctgaggcttatggtcgtggcaagctccggtcatcagaatgcaatccaaagtgttcttatcggtgttcggcgacgtcgcacaagaagccatgcatgttcttttgcttaaagtgctgctcaaaatgcctgtgcgtgcctcctggaacttacggaaacaagcaagtttgcccttgttacaataactggaagaccaaggagggaggacccaaatgcccttgattgagaatttttttttttttatcgaatcaattttatgtcactaataaacagt

SEQ ID NO: 272 - DNA, 717 bp, Citrus
cgaaattcaaactgaacgagtctttgtaatggcgtcgaaaagcaagattctattcatcggtgggacagggtacatcggcaaattcatcgtcgaagcaagcgcgaaagccggtcacccgacgttcgtgctcgtgagagaatccacactctccgatccttccaaatctcagcttctcgatcacttcaaaaaactcggcgtcaatctcgtcatcggagatgtgttgaatcacgagagcttggtgaaggcgataaaacaagtggacgtggtgatatcaactgtcggtcacactttattaggtgatcaggtcaagattattgcggccattaaagaagctggtaacattaagagattcttcccttcagaatttgggaatgatgttgatcgagtccatgccgttgagccagcaaaatcagcatttgccacaaaggcgaaaatccgccgagccgttgaggctgaagggattccgtatacttatgtaacgtcgaatttctttgctgcttacttccttcccaatttgtcgcagcccggggccactgccccacctagggataaagttgtcatcttaggcgatggaaatccgaaagctgtttataacaaggaagatgatattggaacctatactatcaaagcggttgatgatcccagaaccttgaacaaaatcctttacattaaaccccctggtaatatttactcattcaatgatcttgtgtccttgtg

SEQ ID NO: 273 - DNA, 521 bp, Citrus
ccgatcaaagccctactttcaatagtttctagcatttaagctagccatggccatctcgtcgtccaaggctttcattgcttcaattatcctctcacttattcttgttctccatcttgttgcagctgatcagatggttaacacaaacgaaggagatagcagttatcccactccaacaattgactgtggagctgcatgcaaggccaggtgccagttatcgtcgaggccaaacttgtgtcacagggcatgtggaacctgctgtgcccgttgcaagtgtgttcctccgggcacttcaggccatcttgaagtctgcccttgctacgccaccatgaccactcaccatggcagacgcaagtgcccttaaaacaatgattgtgcatgatacatgatacatgcacctgtccgtcgctgcttgtggctactggctagtgatacatctatttatatatcatcaaattaaataaagcgatgttaattgctcattgctgtgtgcaaattaattaaattaatggttgttcgttaaa

SEQ ID NO: 274 - DNA, 586 bp, Citrus
tttttttttttttttttgcaggagactaacaaatagaactcttttattagaaacaaacagataccaaatgcatcttacacaaaccataaaatgcaacattattattttttcttacaagaacttcaaactagatagattagccatttaacaaagcaactatgatgacctctcaaaaactaattcatcatcatattcattagctaacttcgctgtctgctgaccacatcagtacccatattgagccatcgccagtttcagaaaactctcgagtctcaccattttagcttcgccgggaaatacttttcaatgagggagagatagtaaggcttgaccttttccacatctatccggactttgctcttgctataaaggtcatatttgctgaatgtttcaagccacttcagattttctacatcctcctcgttcattaagtgtttgtatgcttctgatttgtgcagcgcatagaatgagtggtatctaatgatgaaaagagctgctgaaggcagagttgttttgttttccttggccaccaagtacatgtagtcatcgtgcccccacgacatcattacattgtccaatccgcatc

SEQ ID NO: 275 - DNA, 621 bp, Citrus
tttttttttttttttttaaaatataattagagttatcatttagagcatacatcaaaaatataataacaacattataacaaaaaaatatatatttccataaaacaacaaatacccatcaccaatttttcttcttcatggataacaataagacccatttccgaaaataatatgaaaaaaattaacccctgcaccttgtaatggcactacagccacggttataggggttagcctggccgccattctggcagttgtagtaggaggcgccccgtcgagagcagggcacagtgttcctctgaagtgcaccgtagctgatgtatttgttggttgctaagatgcgcctgttgatctccgagtccagctcaaactcctcctcctctatccccaaggatccgctgggcatccaccccaggtggtgctggaggtccccacttgcatcaacggcggataatgagttcaacatgaagatcatggcactaatcacaaggagagctgcacaagaactgaataactttgccattttggtgaaaactcagtttctctttcacttgggtttctttcttgaatgaatgaatgattggcttaattgctggctttcttcagtttcttgtgtggttcctttct

SEQ ID NO: 276 - DNA, 795 bp, Citrus
cgagttgttgactcatcgctttttagtatcatggcaacaaattattcaagcagtggcctatatgtattaatacttcactcacaacaggcattaactaatacagttttcatttagactaagttgcgaatgatcagatacactttttcacccacacgtgggaggcttcaaatcttcgacagtgagtagtccataacatctacaaggtaatcagcatcttcttttgtgaagcaaagaggaggagtaattctgaaaacgtttccatagaatccacctttgccgaccaatactcccatttctttcattttgtccattatatatagagtttcagctttagcaggtgttttcaattggcgatcagtgacaaattcaactccaagcaaaaatccccttcccctcacatctccaattattccatatttatccttgagtgcagttagtctttctttcaaataggatccgacaacatgtgcattattctgaagcttatctttctggatcactttcaaaacagcgtgccctgcagctgtacatacaggattcccaccaaaggtgttgaagtaattgcggcgagtcaagacctctgcaatctctggagtggttactactgcaccaagggggatgccatttccaatgccctttgccattgtcacaatgtcaggaacaacaccatgggcctcaaatccccagaaatggctccctgttcgggcaaacccagcctgaacctcatcagctatacaaaggcctcccgctttcttaatgcttttataaaccgcaggcaggtaacctggggccaac

SEQ ID NO: 277 - DNA, 678 bp, Citrus
caaaactccacgcagaaaaagtttttgctcatcaatggcagagctagagaatccgaatgtaatgacaaagctcatcacttttctctcttctttccttcaaagggtttccgaatctaacgacattaactgtcggtttcagcctcaaaaaatctcagtctttcatggcctaactcgcccttcaatctcaattcaaagctatcttgaaagaattttcaagtatgcaaactgtagcccttcttgtttcatcgttgcatatgtttatcttgatcggttcgttcaacggcaaccctcgctgccaatcaattctttcaatgttcatcgcttgcttatcaccagtgtcatggttgctgctaagttcttggatgacatgtactacaacaatgcttactatgcaaaagttggaggaatcagcacaatagaaatgaactttcttgaattggactttctatttggattgagtttccatttaaatgtgaccccaaatgcttttcacacttactgtacctatcttcaaagagagatgctactgctacagcctccactaaatgtagcagaatcatctttaagcattgcaagatcagcgaagctccactcgtgtttcaacgaagacgaaaccacctcacaacaaaagcaacaacagcaacttgctgtttaaaagctttaatgcaaagctgtcag

SEQ ID NO: 278 - DNA, 799 bp, Citrus
ttttttttggttgggttcatttccacagaaatcatgaatgtattcattttgttgaataaattaaagttacactttaaaaaaaaaggaaaaatataaaaaagaaaacacatcatcatgtttagaaacatgttatgtatcatcatcacatccaaattacacacaatcatgtccaaaataaacccccactgataaatgaggcagtaacagaatatacacaatcatatcctgataaaccccattgataatgaggcaagaacaaaataagttcttaagataaaagacttttggctggcttaagaagagccatagcaccacaatccaaactggagaatttcttgtacagtgccttgagcttactttccgcagctgcagagtgaaatttattgaggcaagaacaaaataagttcttaagataaaagacttttggctggcttaagaagagacacagcaccacaatccaaactggagaattttttgtacactgccttgagcttactttccgcagctgcagagtgaaatttaaccaacagcttggcgcaattccttagctgatcttcagagtaacctgtgtggtgctttaatgtttcagtccagaaagggttcttattaagggtgcatctcgcagcatatacagctgatgccgctatcatcgaaggacagtacagaactattgtgggatactgcattagtccaagttcagcaaggaaaaaaaccatgttttccatctccttatcagatgtaacagacgccttgatatatcgaaccagaaaaacatagggtgtaggaacagttaaatgcc

SEQ ID NO: 279 - DNA, 586 bp, Citrus
ttttttttttttttttagaagaattcagcacacataatagcgattaagctcataaacacaaataacacagtgatcaacacatgtaggagataaaacaacaaaacacacgtacccaaacacaagctataacaaactaataaacaaaataatgattgaaatgaaaaaaaaaaaagaaaaaaaaaagggaaaacaggaacaggtagatttgagataattaaggaattgaagctcatctatctcctgcaacgggtgatgacagagcagcctctggtgtaagggtggactggaccccgagccttgtaacagtttggagtgtaataagacctgccagagcgtggagggcacgggattctgtttgcggagagggccccatacgaaatgtagtacttcattctctgccagaacagcgatctccgaccaccttcgccttcaggcccttcaccttcctcttcatcaaaagacattgacaacattggccattcgagcgcgtcactcatcaactccaaccttgattcatcaaccgctacctgagcctcgacatgcagcaggttcattgaaatcatgtgcatcaacatcaagccaaatc

SEQ ID NO: 280 - DNA, 915 bp, Citrus
tttgtgtaggaaataaaaatgaggagttctctggtgctgtgttttgtcgtgttagttgcttttgggtttgttgttcatggttctgtagctagtaatgccgttggagtttatgatctcaagaagggaaatttctctgtgaagctcactaactggggtgccactcttatttctgttgttcttcccgacaagcatggaaagctgattgatgttgcccttggatatgattcagtcaatgactacaagaatggttcatcttacattggagcaactgttggacgggttgctaatagaattggaggtgcccaatttaccttggacggaatccattataagctagttgccaatgaaggcaaaaacatgcttcacggtggcaaaataggcttcagtgatgttgtttggaaagtcgagaagtatcagaatgaaggccatgctcctcacgttatctttgcctatcacagctatgatggcgaacaaggattccctggggatctctctgtcactgtgggctacactcttgttggagacaagcagctgagagtaacaatgaaagccaaagctctaaacaaagctactccggtaaatctagcacaacacacatactggaatctaggtggacacaacagtggtgatatcctgtccgaagaaattcagatttttgcttcttacttcactccagtagatagccaattgattcccaccggacatattgtatctgtgaaaggaactccctatgatttcctcaagcctcacactgttggcggcagaatcgacaagcttccccatggctatgacattaactatgtgcttgaagccggctctggaaacaaaatgaagaaggtagcagttgtacacgataagaaatccggaatagtgatgaagctgacgacgaatcaacctggtgtgcagttttacacg

SEQ ID NO: 281 - DNA, 564 bp, Citrus
gaaaaaatcagacggagaatgggctcgcgtcaaacccatcccgaattcttatatcataaatatcggtgattgtattcaggtatggagcaatgatgcttatgagactgtggagcatagggttgtggtgaattctgagaaggaaaggctttcaattccaattttattcaacccatctcattacacaatgatgaagccattagatgagcttataaatgagcaaaatcctgctaaatacagagcatacaattggggaaaatattttacttctagattgaacagcaatttgaagaagcttgatgttgagaaccttcaaatttatcatttcaaggtacaagagtcagccaataagctggatggactactctctattaacaagtaattaatttagttataaattcccacacctattgtgtttcatcttcgaattctacctatatgtgaatatattatgtcatgggaataatggaatttgcaataatgtcatctgctagttggtgtcagtgtctcacattaataaatattatttccgtaatgtgaaatcaataaaaaaaaaaaaaaaaaaaa

SEQ ID NO: 282 - DNA, 674 bp, Citrus
  misc_feature (569)..(569): n is a, c, g, or t
  misc_feature (644)..(644): n is a, c, g, or t
  misc_feature (654)..(654): n is a, c, g, or t
  misc_feature (663)..(663): n is a, c, g, or t
ggtgaactcatcatgtaggggggtttggactgaatatgacgagatggatagggaaagcttcaggaaaattgcagaaaataaagtttacacatcaaaaactattcttgatctactccgatttgtggctccaaaaacaatgcaacgggccgagactcatttctctcatggtatagcagacaatcttgatgatcccaaatatgagcattacaagtactggtccaatccccttgaaacaaagttgcctgatgctccggacatggaaatatattgcttatacggtgttggtattccaactgaaagatcatatgtttacaagctctcacctaatgataagtgcaagagcattccatttcggatagatacctctgcagatggagatcagaatagctgcttgaaaggtggagtctactttgtcgatggagacgagagcgtgccagttctaagtgctggcttcatgtgtgctaaaggatggagaggaagaaccaggttcaacccatctggcactgctacatacatccgagagtatcagcacaagccaccggcaagcctccttgagggaagaggcctanaaagcggagcacatgttgacattatgggtaatggtgctttaattgaaaatgtctgcgagttgctgctggagcatnccggtctganattggaggngaccggatttc

SEQ ID NO: 283 - DNA, 522 bp, Citrus
ctaagatttcacagcgtcgtcagttatctgcagacttaggaatgacattgtttcccagcagtttgaacagaagagaggacatattgcctcaggagttgaatgctacattaagcagtatggtgtttcagaagaagaggtagttacagtttttactgaagaagttgagaatgcatggaaagatatgaatgaggaattcctgaaaccaactgcttttcctgtggctttgattgagagacctttcaatatcgcacgtgtgattgaatttctaaacaagaagggtgattggtacactcattctcatgcgattaaagaccagattgccgcagtgctcagagaccctgttaccatctgaagagttataagtatttctgtcagttacatttcatggtgttttcagaataaatggtgtttgtatcaagggattgagttactcttcatctcctgctgtttgggataaaatgtaaaagaaattgggttatcgttgatctctgatgtgcggaataaattgtattttgatccact

SEQ ID NO: 284 - DNA, 696 bp, Citrus
ttttttttaaaatacaaggcaatttagcatagtctgttaattaattataccaaaagtttgatgctctacacaggaagaaaagcagtgaactgatcagaatcagtctactaattttatttgaaaactactcgcatctattgttgtcctaggctcgttttatacatataggataggagcttctaatatacatgtagtataaacacgcagcttgcttctttccaggccaaaatgctgctcttgtgatcttcatagcttcctcatcagccacggacattacggctttccaatgctcgattaatccccattttaaaccagttcatgaaaggtatgagactcatctatatgaccattccatcttcaattgttgctttctccattataatggtgattcctgaacgaatgtagaatccaagttctggtctatcagcttcctgaacaccatctttgttcacaatgaccacatcttttcctatcttcacattcttgtcaattatgcagttcctgatttttgtattgcgtccaaccccaattgggacctttccctcagctaacagagaagcaatttccgattcagtttgataatagtctgcacccaacatcacggtgtcctttagctcaacaccataatctatacgtgagcgttcacccactattgagtgctccacagtacattccctcaagaaacatccatgcgaa

SEQ ID NO: 285 - DNA, 421 bp, Citrus
ggagtgttgaacattgcgtgatagcaaatggaagcagcaacaggatttcggttcccattttcatcaacccgagacctcaagatacaataggtccttttccagaagtgcttgcaagtggggaggagccagtttataagcaagttttatacaaggattatgtgaagcatttcttcagaaaagctcatgatgggaagaaaacagttgattttgctaagctaagcattttctaagaattttctgctcgttctgctaataaacatatatattgtcaacttcgggtaaaaaatgagtgctgctaatttcaggggagaaagcctagatcttgattcctatatcactactgtgatcaataaagagtttgtatttcaatttcccattaccttatgtacaacttggaataaaatttctatatgatctttac

SEQ ID NO: 286 - DNA, 812 bp, Citrus
accgcggccccccctttttttattccattattttaatgcataagatattccaaatcgaagctctgaataaacatacagaagctgatgagtcatgaatgggaaaaacttccccacttgaaagatattacaattattatcaatttttttttaaaagataagtttaattacacagaaaacctcatcaaaatttcaacaagaaagtgcgaatctccataggaccaagctcaacaacaagagttgaggcatcaagagggccacctctaacaggggaatgtgttttgccactttctccttcaactttccacgtcattttcttcatctccaatttttcctggtttgctgataagctcatttccttcagctgctttattgatttgcccttgaacattttcttcagttcgactttggctagagttgagtactcggcatcttcaccctcctcgtacagatgtgccagtcgcagaagaacacttccatcatccaactcctcaagagtaattaaagcaacattgagaggcaggctgtagtctgattccatggcagttgattttgtcagatgagattctgtccaagtctctaacttttcttgtgtgaaagccaagagaagcggtgaataaacttcttggccagttgttcgccgccagcgtgctccagcccctagttgattgacgctcaaataataatttcctctaaccgttagtcctttcacaattatcttgaacacaaacactttcatcaagggcttctccaactcccctgccatcatcagcaagcatacgcctatgaagcattatctctacttgtccatcttt

SEQ ID NO: 287 - DNA, 677 bp, Citrus
aacaatatttttattaatagtgacacatttgacgccaactagcagatgacattattgcaaattccattattccatcacataatatattcacatatgggtagaattcgaagatgaaacacactccatatatatgtgtgtgtgaatttatagttaaaattaattacttgttgttaatagagagtgctccatccagcttatcggctaactcttgtaccctgaagtgataaatttgaacgttctcaacttcaagcttcttgaaattactgccttttcgagtagttaaaaatttcccccaactgtatgctctgtatttagcaggattctgctcgtttgtaagctcatccaatggcttcaccattgtgtaatgagatgggaagaagaaaaatggaattgaaaacctttccttctcagaattcaccataaccctatgctccacactctcataagcatcattgctccatacctgaataatgtcaccaacatttatgatataagcatccggggtgggtttgacgcgaacccactccccgtctgattttctcttcacctcaagacctccaacatcatcttgagcaaggacggtaagggcaccggcgtccttgtgtcggccgacgccgagggcgaggtggggagctgggcacggtgggtagtgattaagtctaacaaaggtggtttga

SEQ ID NO: 288 - DNA, 741 bp, Citrus
gagccctaatgccctatgcataatctgtaactctcgcaaccaggaaaataaggccaaaagcagcctaaagaagtagttataaccataaaaaaagacaatagaagaaagaaaaataaaattatagctaggaatgcacaccaacttcaaaaactcttaaaggacttttcaagcaacggatggagctggaatgtatgaaatggcaagctcgggcatgggagcaatgatctttgactttgaaaatgtttcctcttcaggagcactagggttttgatcagcatcgaaatcaagggattcatcattgtaaatatcccaccattttgtcaccaacatcttgacgtcctctctgtccatgttaacttccttgcccgagtacctccatggctttgacccagcggcacagtactgaaccgctttaactttctcaagctccacgttctctgggtggcgccataacatggctacaacaaggttgtatgccaaagggatgggtttgtacgtcttttggaagaacatattcaggaaatcgtgctcagcaaaaggtgttggtggggtgatcttgagagtctggagaagattctcgtaagttaaacggctagcgctcagacacaaacatcccagcattgaagtacaatggaggaggcgatcccatctcagctggccatgtcactttattcgggcgctgctggcaatacccaattgagtattgcggcgaatggctccatgtcttctcacaaaagcctc

SEQ ID NO: 289 - DNA, 652 bp, Citrus
tttttttttttttttttggcgagaacaaacaggacgttagcataaaaataaagttacattatgggttacattaatctacaattattgaaacatgctcataaaggcaaaatcttttgagcaatgttgctgcacatttttgtgaaaaaaaattattgagtaacaaaaaggacttgaggcagggtctcatgggcagcaacaaaaattgtctgcaatttgcagtccgcaaaaagcaattgagctgaattgttgttgttagtgcttccaatggggttcaccaggtgaaacaaaatttgctcaagctcttcaccgtcagtccactcatgaatctcggccttaatgaacattggattcctgaaaattaaatcccctaatgggaagtttttccttggcatcacgtgatctccttcactaaacttcaagcttggacaataatctccacttccatcaccaaaaaaaaatattttcttggttccctccctaaaaaaaaaaacttgaatcctttcaatgaccacccccttgcacatatttggcgggcaaaaattgcagccctgaaagcatttggtgaaatcctgaaaagggaaaattctcagcctgccttcttcatcaacaaagccaggatttgtgttgatttccgaaaaacaatctctaatcc

SEQ ID NO: 290 - DNA, 827 bp, Citrus
ataataagcttataacagggaacaaaactctaataacatgagatggggcatgaaatcgatcatgttcctgagagtttcacacagactttattgctttttggcatgcctttgacaaaaagcttttatcctcccaaggccatcttcaagagttgcaggctcggccgcaaaagctatgcggagccaatttttcattcccacagttcgccctggtaaaacaatgactgattcctctttagcaagtttgagacagaattccaagtcatcaccaatgtcttcaagcatcgaaacgttcagcttcaccatgacaaacatggccccttgtggtttcactgggcaggttaagcaaggaatctccttaattctttcatagcatatgtctgcagtctcttttagtaagccaatgattttcgcaaagaaagcctcatttgtttcgtcaactatacggggcactgctgcctgaatgaaggttacaggatgagaggctgcattgagacagccctttatagaatcaacaaatcctgaattttgaaggatgccattggggtcacttgtcacaagccatccgaggcgccagccaggaacaatccatctctttgatatagacccaagactgataacaggcacaattgacccgaaaactcccattggcacataaggcgtgctcccaaatgcaaggtgattgtaaacttcatcagcaatcacaataatcccaagatttcttgctgtccgcgcaattttctgcagatgttggtaactgaagacatttccgcatggattgccagggtttatgatgacaatggcaactgtattctcatctgcaagggctt

SEQ ID NO: 291 - DNA, 766 bp, Citrus
gatttcgagctttttattttagcaacagaaagaaagaaaaaatgtctggaattgttgtgattttcgacttcgacaagaccatcatcgactgcgatagcgacaactttgttgttgatgaactgggtgctacggatttgttcaatcaactccttcccaccatgccctggaattctctcatggacaggatgatgaaggagcttcattcacaaggcaagacgattgaagacattgtggaggttctgaagaggattccgattcatcccagggtcgttcctgccattaaatcagcccatgctttagggtgtgaattgagaatcgtcagtgatgcaaatttgtttttcattgagacaattttggagcatcttgggattagagattgtttctctgaaatcaacacaaatcctggctttgttgatgaagaaggcaggctgagaattttcccttttcacgacttcaccaaatgctctcatggctgcaatctctgcccgccaaatatgtgcaagggcgtggtcattgaaaggattcaagcttctttatctaaggaaggaaacaagaaaataatctatcttggtgatggaagtggagattattgtccaagcttgaagcttagtgaaggagatcacgtgatgccaaggaaaaacttcccattatgggatttaattatcaggaatccaatgctcattaaggccgagattcgtgagtggactgacggtgaagagcttgagcaaattttgcttcacctggtgaacaccattggaagcactaa

SEQ ID NO: 292 - DNA, 479 bp, Citrus
tacggccgggtactggaggttgcctccgaactcgactctcaaggatgttgtgctggttgtaagagcagatgaggctcaccaccgtgatgttaatcactatgcatcggacatacattaccaagggcgccaattgagggaatctccagctccactggagtatcactgatccaatgatgaaaagaatcagaattgaaatacaacatgaattttactgcggtagtaggattggtaacaataaaacccttttcgagtatacgaatagtatttgttcgatttgtaaatgtttgtggagtaactgaagtttgtggtcggtcctttgatgtttgttaagagtcgagtctgtttaaacacgagtttgaagcagcatatgaattgttatttttctattaaaagaggcttactattcctatgccatcaaaattggtagatgtatgcgaccacctgtaaatatttattctgcacctaattgttcatgagat

SEQ ID NO: 293 - DNA, 511 bp, Citrus
agatggaggcaaggcactaagcgcaaaagacatcaatctaggagaccaatttgtgtacaagcatcttggaagcatggcaacagttggtcgctacaaggcattggtggatctacgccagtctaaggatgagaaggggatatcacttgctggatttctgagctggctaatttggcgctcagcttatctaacgcgagttttgagttggaggaataggttttatgttgcagtgaactgggctaccacgttcgtatttggaagagacatctccaggatatgataggtcacgggttgatgaaaacaaggtcataatatatcattggatttgcttcgtgttggatttgattcatatattatagattgtaagttggattttgcagaccaattcttgtaacggataaaaatgtcttcttatacgaagcagtttcattttttggaaaatattactttgtagaaaaaaaaaaaaaaaaaaaaaaaaaaaaaccccgggggggggccgggaccccatttcccc

SEQ ID NO: 294 - DNA, 693 bp, Citrus
caagaatatcagaaccgggttacagctttaatcggaccgcagcggactaagcaacttgttaatggagcactcatcctcatcactgtcggtggcaatgactttgtcaataactatttcttggttccctactctgcaagatctcgtcagttttctctaccgaattacgtcaaatatgtcatctccgagtacagaaaacttttaacgaggctatacgaccttggagcaacaagggttttggtgaccggaaccgggccgttggggtgtgttccggcagagcgagctatgcggggcagaaatggacagtgcgctgctgatcttcaacgagctgccgatttgtataatcctcaacttgttcaattggttaaagatctgaatagtcaatacggttcagaaatctttgttgctgttaatacgggaaagatgcaatataacttcatcagtaaccctcgagcgttcggatttacaacatcaaaggtagcatgttgcgggcaaggaccatacaatggcctaggcttgtgcactccggcatccaacttatgcccaaatagagctgtgtatgcattttgggatccatttcatccatctgaaagagcaaatggatttattgttcaagaattcatgactggttcgactgagtacatgtatcccatgaatctcagcaccatcatggccttgggattcaagaacataatc

SEQ ID NO: 295 - DNA, 416 bp, Citrus
  misc_feature (64)..(64): n is a, c, g, or t
  misc_feature (67)..(67): n is a, c, g, or t
  misc_feature (84)..(84): n is a, c, g, or t
  misc_feature (227)..(227): n is a, c, g, or t
  misc_feature (233)..(233): n is a, c, g, or t
  misc_feature (240)..(240): n is a, c, g, or t
  misc_feature (267)..(267): n is a, c, g, or t
  misc_feature (343)..(343): n is a, c, g, or t
  misc_feature (381)..(381): n is a, c, g, or t
ggcacattgatggtcataacttctttgccgtagggatggatggaggggagtggactcctgcaantanattaacttacaatttangagacacaatctctcgttgcactgttcaggtgtatcccaagtcatggacagcagtttatgtgcctttggacaatgtgggtatgtggaatataaggtgctgagaactgggctcgccagtacttatggccaacaattctatttangagtgnattcctntgcaaattcatggagagatgagtatcntatcccaagtaatgctattatatgcggccgggctgtggggcatagaaattgacccctgtaagcacggcatgattgntaatatgtcacaagacagtgacagtcttgaatatgatntagaagagaagatatctgatggctttaatcgaggc

SEQ ID NO: 296 - DNA, 734 bp, Citrus
ttttttttttctgtaaaacttattttaattaatattctttattgggagcctacaaacaagctgaataacaacaagagtattcaatgggaatagaaatacacttttactctaattataaacatattttagaaaaaaaggtactctgcagaaaaaacaaatgacccttttgcttgttacataatggcttactcgcaagaatctgttaactgaatctgtcactagttgcttctatttgtcttcttccaactcctgcacccttttcttattttaataaagttgagctttcttcatactccaggcactcaggccgttgattttgacattctcagtgccattattgaatgcatacaagtgggcataatcatcaattgccaaagttggatacactctagctgtgatgcaggctttgcctccaacaccaaagctctccactattgaatgatcaatcagactccttaacgacagcttttcataaactgggtccacattcagaaaagcgccataagtggtcttatcattatcactattcaaggaagacctgctttggtcactgcacataagcaccacaaacttcttgtcttcgcctttgaatattctgaaaaacactgctgtggattctttcaaatcttttgaagccaaagcgagcagcccgaatggaacaagagcgcctttaactgatgcacccttttggctacaaatcaactgtggattggtccacccggggtccagctttt

SEQ ID NO: 297 - DNA, 850 bp, Citrus
caaaagcctaatattgcggcattgtgatagcaagggccttgctcttttttgctctcattgattcctctataaaaggcatagccatgcttgacataaacccattaacagaaaataatcaaaattaattaaaattagccaaaatattggtactttggcagctaagtaccaaaaaaaaaaatggcaatgcgaaggggagtttctttgcgctgctgttgcctctttttgtttttgcttctcatcgaaaatgcccatggaaaccctaattacagagaagctttggcaaaatctctgttgttttttcaaggccagaggtcagggagacttgccaaggaccaacaaatcacttggagatccaattctgggctatctgatgggttacttgctcatgttgatttaactggaggctactatgatgctggagacaatgtgaagttcaatttcccgatggccttcacgacaacaatgctatcctggagcacactcgaatacggcaagaaaatgggcccagagatacagaacgccagggcagcaatccggtgggcgacggactatctcctcaagtgtgcaaccgtaacaccggggaagctctacgtcggcgtcggggacccgaacgccgaccacaagtgctgggagaggcccgaggacatggacaccgttaggtctgtgtattcagtctcggctagcaatccaggttcggatgttgccggagaaaccgcggccgctttggccgcggcttcgttggttttccggaaaggggaccctagatatgcgagcttgttgctgaggactgcaaagaatgtcttgcaatttgccatgcagtatcgcggggcttatagtgactctcttggct

SEQ ID NO: 298 - DNA, 779 bp, Citrus
  misc_feature (763)..(764): n is a, c, g, or t
ggggacaaccttaacagtgattttcaaatttcttaaattggaaagtccaaaatgccgccggccggcgctcatattctggtctatccgttcccaacttccggccacataatcccactcctcgacctcacaaaccggttactcacccttggcttaaacgtcaccgttttaatcacccaaaacaacctcccattactcgactcattaaatgcaaatcatccatcgacttccctccaatccctcgtcctcccccaacctaaatggccagcaggttccccagcaaccaggcttcttaagttcatgcgtgtgttgcgtgaacttcactaccctgcactgctcgactggttcaaatcccacccatcacctcccgttgcgattctgtcagatttctttctcggctggacccaagggttggtcgctgagctcggcttgccacgtgtggtgttctctccgtccggcgcttttgctttgtcggtttcctttgctatgtggaccgacttgcccacgaacgatgaccccgacaacgtcgatgctctagtgtcgtttccgagagttccgaattgtccggtttacccctggtatcagatctctcatctttatagaacgcttaaagaaggagacccagattgggatctgcatcggagcaatatgatggccaacaagacgagttggggaatcgtgtttaactcgttcgctgagttggaacgcgtttacatcgatcacatgaagaaagaaatggggcacgaccgggtttgggccgttgganntgttttgccgcccga

SEQ ID NO: 299 - DNA, 773 bp, Citrus
aacaaaacagaacagagcatggggaaacaatgcttcttatatttcttcatgctgtttttagtttctgaaggtttaacaaagggagttgctggcctggcttgcaactggggcttacaatcaactcaccctctgcaagcgaacattgttgtgaagctgatgaaggacaatggatttaataaagtgaagctctttgaagctgatcctgaagctttaaaggccctgggtaagtccggtattcaagttatggttggcataccaaatgacctattggcaccattggctagtaatgtccaagctgcagtggactgggtgcaacaaaacgtctccaaatatatatcccaaaatggagcggatataaggtatgtagctgtgggcaatgaaccttttctcaaggcctacaaggatatgtttctccatacaacattgccagctctccagaatattcaagcagccctgataaaagccggtttaggccaaaaggttaaggtcacagttcctctaaatgcagatgtctaccggagtgacagtggcctgccctccggtggaaattttcgtgcggatattcatgacctcatgatctccatcatcaagttccttagggacaatagtggccctctcaccattaacatctaccccttccttagcctctatgccgacccaaatttccccgttgattttgctttcttcaacaacactgctgctcctgttgttgacggtcccattacttacaccaatgtctatgatgccaactttgacaccctgatttcagctct

SEQ ID NO: 300 - DNA, 813 bp, Citrus
gcagaatttaaacttcataaagcaaaggagttattggaagtacattatataggctatgtgccctggcttaggaagactaataacgtaagctctaaaagtatctttcaaacttggttgctaaaaatttcttcagctgagggtccgtctcatagtacacaatttctccagtgtcactcacaaagtggtcttcgccaatgcttttcaccaaattcttgatcaagtggactggaattggccctgatttattcggctcacggtagtactttcccagcactggctttgctgcctttgtggcctctactaagtgataatgtgggatttgagggaaaagatgatgaatgacatgagtgccgatatcatggtgaatgttgttgaagattccataatctctatccactgttgttagccctcctctcaaataattccattccttgccacggtaccaaggtagtttgtgctcatcatcaccatggtgatgcaaataagtaacaaagtccaaccacataacgaaaatcaagtaaggaacaccataaagcttaaacattgtgataggaccaaatacaaaggataaatacaccagcaagccaaacatgaaagtccaacacgcagttgaaatcaccactgcttttctctcccctggcgaaaacaaactgctgtaaggattgaaatgagatccatcctttccaggacttcggtaccacagatatgcagggtatgctaacatgggtaaaggcaatgagaatctcagaatccttgtactaaaatccaatttacttgtaatcttctcaggcatcggcacccaagattcatcat

SEQ ID NO: 301 - DNA, 689 bp, Citrus
ttatgggctattcaaattctgtgctggccacattcttttttctttgcttagagctttgtgtgatcaatgggcagcctctagttcctgcaatgttcatatttggggactctgttgttgatgcaggcaacaacaactacatttacacaattgttaaagcaaactttcgtccttatggcagagactttgttcatcacaaaccaactgggaggttctgcaacggaaagctagccgcggactttaccgctgaaaacataggcttcacttcatatccaccggcttatcttagtgaagaagccaaaggaaaaaacctattgattggtgccaactttgcttctggtgcctctggttactatgaaaccacagcaaagctatatcatgcaatcccattgagtcagcagcttgagcacttcaaagattatcaaagaaaattggagggcattgcaggaaaaaccaatgcttcatcaatcatatctggcggactttgtcttgttagctctggaagcagtgactttattcagaattattacattaatcccctcctttacaaagtctacacgcctgatcaattttcagacattctcatagaatccttttcagcttttgttcagaaattgtacgggctaggagtgaggaagattggagtgtcaacgttgccaccactaggctgtctgccggcaccatcacagttt

SEQ ID NO: 302 - DNA, 599 bp, Citrus
gagggtggctcctttcctagtgccccgagcggctagagaagattgcaacgtagccggctacgacatcccaaaaggcactccagtccttgttagtgtatgggcgattgggagacacccaagtttgtgggaaaagccaaatgaattttatcctgagagatttattggaaaagcaattgatgtgaaagggcatgattttgagctgctgccatttggggctgggagaagaatgtgtccagggtacagtctcggccttaaggttattcaagcaagcttaactaatcttttgcatggatttgcatggaaattgccaggaaatatgagcaacgaggagctgaatatggaggaaatttttgggctttctaccccgagaaagtttccacttgaggttctggctcacccaaggctttcgccccatctttacaatctgtgattgtggcttccaaaataattaattacggcgtagcgtacttttgagtaagtggtttgttagtgcgaaaaggccatggatttgcacatgtaatgagattttaaacccaaactaacgtgcgctgctgtttggccccaaataacgcgtcatcttttgatatataatctttttg

SEQ ID NO: 303 - DNA, 781 bp, Citrus
aagacttacttgtttctgttcataggataaacaagtacaggccctgtggtaatgttacgtttaagaacaatgtccctgaaaacacctttgttgaagtcggagatacgagattttggtaaaaatagattcagccatggatgaggaacttcccaaagtccttgcgactcaagtttcagctccccacttcgaaccctattcaaaaattctacgtaggagacatctttttcaaacataaatcctggaagataacttaatcctttgaacaatgtttgcagttccttaaaaataaaaaataaaaacacgtcatgtttttattggttagttgtacgtccaacggaagtataaaggagaaactttatcgtgctatatatttgtaccttgtgcagggtactttgggtatggtcatcataatatttggcgacttcaagacagtaaatgatggcatgtgttttaacttgggagataattttgagatgatcagacggtgggaagaaggaggatctccagttatctagagaaccctggtccattattagtgtgccttccaaataatccagtgcttgcttttgtctccttccattcattgaaatcaagtactcttggtctctactaaaactggagaaatcactgtatagcattcgtacccacttaacctacaaaacggttatacatgagaatattattcacattgtctggatagcataggcttgttaattcaacgtgttttatgtttatatatatctaccctttttggggctggctcaagagcaattctcgctct

SEQ ID NO: 304 - DNA, 694 bp, Citrus
tttttttttttttttttaaaaaaaaaaaaaaacccgcattacacaacattcttcgtagtttgattgctttacattcccttactgaaaggctgagccaattatcaaattgataaatgaaaatcaacataattttaaataatactaacagtaatgctataacagctaccgctgtaacaacggaaatacaaccttcaataaaaaaaaatgaaacctccagctggggtcaatttcaagttccacttgtacacactcctcgcataaataagcaaagcaacattaaactaatcgaatataaaattaaaaatcaaaattctactcgaatccacaaattgcgtacccaacgggggatcattttattaaataataatttaaaggggcctcgtgtgtctgccagctgctttgccgcaaaaacgtgcattctttgggatgggatattcatcccttagtgaagttgatgctgtgtaaacacccaagtaaaattgttgtccaaggtactgtcgtgcccaaaactcaaacctcaagttccacatacctacgttatccagtgctatataaatcgcagaccatgaccaagagtgaattttcaaagaagggtagtggtaataacaatagcaatatcaataaggtgatcggaaagtcatcggcggcagccggaaacgatggtcaatcagccgggaaacgtgccgcggagctt

SEQ ID NO: 305 - DNA, 460 bp, Citrus
gaaaaggcaagtgaatgagtcagatataaagaatttagtttacttgcaagccattctcaaagaagcaatgcgtttgtatcctgcttcgccactctcaattccacacaagtctatagaagagtgcacgattagtggttataatgtccctaccagcacacaacttgttatcaatgtttggaagcttcaacgtgatccacgtgtctgggaagagccttgtaagtttcagccagaaagatttttggcaaggcacaaggatattgatgtcagaggacaaaattttgaattgttaccttttggtagtggtagaagagcttgtcccggagtttcatttgccctccaagttatggaatttacacttgctgctttacttcatggctttgattttgcaaccccatcaaatgaaccggtggacatgggagaggcactagggttgagtatccagaaagctagaccacttgaa

SEQ ID NO: 306 - DNA, 624 bp, Citrus
gaggcaagaagatatttattagagtttaaaggcctgtggcgacggactagtgaagggtttcggttccggtccaatttccttgctgaagaaccatcttaactaatctgtcaaaattattgtaagactgacctccaacggcagtcgctgcttcagctttctttttccattcccaagccttctgcctcattttctttccttcatctccgtccatcatttccttaacaagagcttcaatgtcaccacgcttcacatcgtgattgacttccatgccaatgccccaagttgtgcatgcatatctgcaatttgtttgttgctcagcaaagaaaggccagcagattacaggcacgccgccgcaaatgctctccattgtagaattccagccacaatgtgtcagaaaagctccaacagaggggtgtgacagcacttgctcttggttgcaccagctaactatgaatcctctatccttgatctcttcaaaatactcgtcaggcaagaccacggagtcgcccatcacaacgtccggcctaagaatccataaaaatggacgcttgctatttgcaagaccccatgcaaattctgtcaagtgttgctctgtcatcacagtaatgctgccataattaacgt

SEQ ID NO: 307 - DNA, 439 bp, Citrus
aagttaacaagcaacggggatttgttttcgttgaggaaggtaatgacgggatcaagaattggtctgtaagcttgcttaaaggagcctgctgacggcggagaggatacttcaagagctccgaattcaatggcagtggaaactttgatttggcttccaaggttagctccgttaatggcattttgtgtgtttctcatggcgggaacaagatactgagcgaagttgtctcctggttttgcttcatttcctacagcgatgtatttgaacttgacattgttaacaaaattttggatgttgtcttggacccaagtgttcgcttcggcttgattggaagcgattatctggagcttatcgttgggaaggcctagcaaaacttcaatgttggagccacggagagcttctagaacttctttgtttggatcatagagtctcattcttctga

SEQ ID NO: 308 - DNA, 433 bp, Citrus
  misc_feature (37)..(37): n is a, c, g, or t
  misc_feature (39)..(40): n is a, c, g, or t
cttggctctctctgtccaaacaaaatggggttgcctngnnaacaaagaattcatcaaacacttagtattgttgtacttgttcccattttgttaattgcaattagttcaattttagctagtgcaaatatttccaagaagctagaccaagaattggtgccaccgccgcagataccagacaccagtataaagtgtggcacatgcccttgtgtgaacccatgtggtcagctcccccctccgccaccaccgccgccgccgccgccgccaccaccatcgccgccaaagactacatactgtcctccgcaggtgcagacaccgccgccacccaggttcatctatgtgactggtgagcctggggaaatttaccacactgattctgatgactgggggttttactcgactgctcaaccaaatgtggctaaaaattggttgcttt

SEQ ID NO: 309 - DNA, 670 bp, Citrus
ctcgtgccgaattcggcacgaggtgaacaggagactatagaacatctggatgtatctttgcttagctagctttggttctttgtttatctgcctccaaaatccataaatggatcccatgttcagcactttgtttgcataaatcttccatgtatagctacaatacaacatagtacatattaaattatacagaaaatccaagggtatgtaatttaaacatcctggtggagtgccatgtttttaccattcatatatacgttggcgacctgctgctgacatctggttccagtatccagcatccgtcttgcatttttcaaagaaatcagcaatcttgttgcttgattcatcaccattgtttgggtcaatgtggaagcctgagaccccatcaatgatgatttctgctggacctccttgattggttgcaaaagtgggtaagccgcagttcattgcctctatgactgtcagaccaaaagcctcatatagtgcaggctgcacgaaagctccttttgtatctgcaatacagcgataaagctctccgtttcgatatctatcagtttgagccgcaatccacctaaactggccctgaagttggtatttctcaatcaaagtatgcatcttcttgatctctgcaatttcttctctgtcatgcgattttgatggatcaaagatccgg

SEQ ID NO: 310 - DNA, 562 bp, Citrus
cttagcttactgtgcctctccaacatcaccgtcatgttacaaggttgatagctaaaatggacaaggtgatgcacatcagaatgtccatgaatgtgatcttctcaaaaggggtttcaattgtttgtcttcctcgagtgatatcattcccaaatgagatgggtcttctaacatcatctttgccaccaagtaaccggcaattgaccaagtttggaacttgcgggcctgttttccgatgtatcgaccaagcttcccatcataatactcgggccagctatctttcagcaacctgctttcagcaagttcaatggcccgtctagcaatttgagggcgcccggtctttatacatgcagcagtgagaagccacagaagtactggccaagatcccccattgtggtaactccacctggtattttttggatcgcatcctgtaatgattctccagtcatggctttctattgctggatagcaaacctttattggcattttctccaaccaactcctcccagcgtgattctataagatccataattgcatttgaatgtttcttcagtggccaatgatg

SEQ ID NO: 311 - DNA, 668 bp, Citrus
aaaatgataatgatacagaaagaaagaaatcaaaagtgattaattatatgatatgatcataagatctttgatcttcatatgtctctgtctcttctgcattcaggaggaagaactgggaatctagaacgatcagtacagtaattgtaaatggtgaacttactgcgaacccatttgagccttctgtactgaaaagcatcaagatcctgaaactctttctgatcccaccagcgtttcccctgtgtagcacagtacttggcctgaacagaggcttcacagccatcaatatggaagcctttgtatgaagcaatgaaaggagccttggaccaatctgttttctcaagtccacctcttgtggcccagtcatccgcattccacagacttgagtatattttcatcggttggttgaatgggaaacgaacccccaaatctttgcaatttttgaacactctaattggtatgtcatccacgaagaatacaatctgatacatattccagagcacagagtagaagtggtaagctttggttggatcaaaccaaagatagattctttgttctctgtcaccctttcctccagtgaacacatttgtttgcagaatgtaaggctgtcctgttctgttgcccaagaactcaaaatcgatttcatcatgctctgagttttgagaagacag

SEQ ID NO: 312 - DNA, 744 bp, Citrus
ttttttttttttttttatacaaaaaagtcaaaagaggtcaaacctcaatttttgactttccaagttgagctcatttttattattaaaaaaaaagaaacacttcatctcatttccgtaagaaggtttcttattttacattggctaaaattggagagaacagaaagggaggctaaccgcaaaaggactagtatatcagattaaaagaaaactaatctattttgcatgggttgtccatttcaccaagggaaacgtcaggcaatttaccacaatcataaccagtaactttattgccaagtaccccaccaacaaggaacctatagaaaataacatctctcaagaacctcatccaccaatttgaccctccatcttgtacccatccagacaaatacgaccctataaccagtcctgtcacacgccattttctttccttcacatatccatcgatagcttgagcaacattattgtctcctgttgtagcaatgtgtcctttggttttaattaataaattaccaatgtgacggccaagtaccacggcgtcttctagcgcctgacagccgccttgtccgagatcgggagtcatcgggtgcatggcgtctccagccaccgtgacgtttcctttactcagatttccaaaaaagacgttccatggatgtctaaacatcaatggtgcccagtgcaacgttgaagcatcagaacgccgaacaatgaccgagtaaaatgggggcaagaccttggcatacttct

SEQ ID NO: 313 - DNA, 680 bp, Citrus
tttttttttttttttttcaaataatacaagtttaattaatttattatatgcatatattgaaattatctaagtccaattgatcaaaagctagatatctagcctgaatacatggaacatataaaagatgttacacagtgacatcgaccatatatatatataaattttgcaaatagcttttaacatcacaagacaagacatacaaacattaacattaacacagacagctatttatggatattaataatttaagtaattaataatctccaagctaaaattaaaattgagttggaatggtgagaggcaaaaagccatgtcgaaaagcagcgtcccaaacggtgtcaacgttggaaatggtgtaaccacactcgtgttcattccatccttccaaggcatgcactatccccccaattctccacgcactcatcacccttcttggaaaccaattctcacaggcgtcaacattctcaaaagtagcaggagtggccatcgctggtgtgagggggtaggtacagtctttacgtcttttcttcgccggtgggaactgtgagaaaggaacgaaaattgttcctctttctgccttggattgttcttcttcagtcagtccatttcccaccaaccatatcttttggcagtagctccttgaaacaagcaagttcttactttcaaatttgcccccaaat

SEQ ID NO: 314 - DNA, 715 bp, Citrus
  misc_feature (83)..(83): n is a, c, g, or t
  misc_feature (287)..(287): n is a, c, g, or t
  misc_feature (595)..(595): n is a, c, g, or t
  misc_feature (598)..(598): n is a, c, g, or t
  misc_feature (649)..(649): n is a, c, g, or t
attgctttgaagatgcaagccgttttaattggtgcctatgacaatccaagcattgccattagtaccatcatcaaatttcttgnggagctacctgaaatttatgaacaagttcttagagagcaaatggaaattgcgaattcgaaaggacctgatgagttgttgagctttgatgacctaaaaaggatgaaatacacttggaatgtcataagtgaagtgttaagaatggaaccgccgaattctggaacctttagagaagcccttacagaagtcactattgatggatatanaattcccaagggatttaagttacattgggcagtaaatgcaacgcataaagacccggaatgctttccaaatccagaaaagtttgatccatcaagataccaaggaaatgatatagttccattttcttatgttccatttggagcaggaccgcacatatgccctggaaaagagtttgctcgattaaaattacttgtattttttcacaatctggtcagaaaattcaggtgggagaaaataatacccgatgagaagatgataaggaacccaaatctaatgcccgagaaaggacttccagttcgcctctatcccnacnattaaactctaaataattattatgattaaatattgtactgttgtgtgtacnaataaattatgctaaaaaaattaatgcaattttataataatttttttttgaaaaaaaaaaaaaaaa

SEQ ID NO: 315 - DNA, 678 bp, Citrus
aggagaaaaagaaaaaaaatgaacgtagatctgctgcccgaagattgttttgctcacattttatcatacacatctcctagagatgcgtgccggctttcgcttgtctcgtcgacggtacgatttgcggccgattccgacaatgtgtggcagaaatttttgccggttgattatcaggaaattctctcaagattagtgttgccgctggtgtacatttctaagaaagagctgtttatgaggttatgtagcccagttctaattgaccaaggtaaaaagactttttccttagagaaatcaacgagcaagaaacgttacattctaggtgcaagagaactttcaattacgtgggcaaacaatcctctctattggacctggaaacccttccttcagtcaagatttacagaagtagccgaacttagaaccattagttggctacaaataactggtaaaataaacaccaaaaccatatcaccaaaaacacaatacgctgcctatctcatcgttaaatttgccgagagagctttcggattagactcgttgccatcagaagtatcacttgaagttggtaatggcagcttcaagtcacaagggacagtttatttgcgttggcaagaaagaaagaaacagttagaatgtctagggcatctgtactttttgcatcgcgatgaagctctgagatct

SEQ ID NO: 316 - DNA, 947 bp, Citrus
ctccattccagaaacaccttaacttacaagtacaataactcgacgagacaaatattcgtacaaaaagaagcccacgaataaacgttaacgcaggcatggatgcatactagccataggcctggttggggtaatgcaattcttgaaggagcattggcgtccagctaattccaaaatcagagattcaatcacttacccaatgctcctaacgaaataatttaaaaacaaaaaacaaaaaataattacttctaaaacaacctatgcaataatttgatctatacaaaatttcctccttgagctaattgcccatgtcatcgccaccgtgactgaatgcagcagttagctgcccaaatttcaagccagccttactggcaaagttatctctgcagttataaggactcacttgcaaggttacaaaaccaattgaccgatttgatgcaaaccccccttcaaatttcaatgtactcgcaactgcattggtcgtacgcttatagggactaaaccatttagcctgcatgtatccattcctcctccatggcggcacagacagttcggctgacttaattgattctctagcagcaccacacattagcctcagaatctgcttaagcgtccccggtttgccaacaaatattggtgggaaaagattcactagagacatgtaaccatccgcggcacgagcaatttcaaattgtgcagctaagtttacttcaataatgtatcgatttgcaccaagattcacgtctacaaattcataattcccacatgggaacttggcagttttctcccaccgtgacttgcagagaccagcatcaaatcctttatcacgcaaatgactcatcagccgtcgtttaaaagccggcgacgatgcatctcctaaaacggtgcatgcaaactctgtctcttcacgaatccttcgcttatcatcatgatcttgatcatcacactga

SEQ ID NO: 317 - DNA, 884 bp, Citrus
  misc_feature (38)..(40): n is a, c, g, or t
ggggaaaaaacaaacagcagctatcctcaaaaaaaaannnaacaaatgaagacttcattagtaacaacactctccttccttatacttgctttggccacaaaacctcagttgggcgcctcaaaatctgaacctatcttagatgtctatggcaaccaggtggactccagccacaggtattatcttgtctcagcactctggggagttaaaaccggcggtggaattagcgcggacaaaggcaaaaatggacagtgtccaacggatgttatccaattaagtcctaaggacaaaaggggaaagaatttaggtttacttccgtatgacaattccacaattgtccgggaatccactaatattaaattgaaattctcaagagtttcttctcttcagcagtgtaacaaagattcgttgtggaaagttgacaacgataacgcttcattaggaaagcagtttataacaatcggtgaaggtaaaacgtgtcaaaatttttttaaacttgagaaagttagtgcatcaatatttgatatgaaaatagcactagacattccctgtctatacaaaattgttcattgttcaacacttgttaatggttcttgcgatacactctgcaaagacgttggcgtttctaatgtggatggcgtccaacgtctagttgtggttgatgataatgatcagccaaatctgcctttgcctgttgtgttatttccagctgatagtggaagatctatgttatttccgtctctgtaatgaataagccaacaggctgtattattctaaataatggaccaggctagtactctttaatctctatggttaagcataaataaaatagcctatgatgcttcgctgttagttaaacaaaaaaaaaaaaaaaaaaaaaaaaaaaa

SEQ ID NO: 318 - DNA, 539 bp, Citrus
tttttttttttttttttcggaatttgaaactagcaaagcccttgtggccataaccaacttattaaggataaacctcaataagggatcttaaacctaaaatggggataattttatagtcactaaaaccggcatacgtaaaaagtttggtccattctttctcatctcgctctgttccggtgagtaagaccatcatcaacatatcaaagaagagttgtgtttcaatagacttatcatccccttttttattctctctgatcatgtctattataatcaccttccctttcttaccatcgcttgtgattgcttccttacatttcttaagaatcttcacgcattcttcatcgttccagtcatgtaatatccacttgagtagaacagcgtcagctggggaaattgcctcaaacatgtcccctccaacatatttgagattggccaaatcgctgtcgaggccattaaccacatgtggcagatcaaaacaagtgcactccaactttggaaacgctttagctatggccttggccgcggttcctatgcccccg

SEQ ID NO: 319 - DNA, 541 bp, Citrus
cccaaatatggctaaacattaaaagagggagcgtggagggtctcaatcctctcatgttcgtgtttgcattagtcgcgaatgtcacttacgttttaagtattgttgtgagaaccacggaatgggaaagtataaaggcaaatatgccatggttgctggatgccattgtctgcgtgttgctcgacttatttattatactgcagtacatctattacaggtatttcagaaagaaaagtgcggattatggagaagatgacgacggcgactatgtggatgcaactaaagcaaatgattaatcttaattactctttttgtatttattggtacttttaacgtctatttatttccgttttggctagctaaagagctcgggatcttctatccagagaattattaatgctttcttctctttttttttttcttttaatcttttgttggttttctccattcggattctcaagtgtttattaaaaatatgaacagaacagctagtaatgcgaatgatcaacccactcatcattgattcaaaaaaaaaaaaaaaaaa

SEQ ID NO: 320 - DNA, 698 bp, Citrus
gattcggccgaggcccaggctcagccgtcagctaacacatcctccgttgggtactccattccggcaacggctgcaactcttccgtcagctaaccacgttaccgacgttgacggggttacagaggggtcgaagtatacattgtgttattacgaagaagaacagagggacagtgatgcagacggagaggtgacatcagtggttaaagaatggagggacgacgacggcgtcagtggttgtggagagcggtgggagtgggagagagtgagaatgacagcgagaattggggatatggggtggtaccgttggcaggatttgacggtggttaacggcaatgttgttaggttatgggacgagtgtcggaggagaagatcagaaacgagttgctgctacagctcatgccgtgctgtttggtcgttggttaattaattaaaaattaatcagacgaggcaagagtattaattaatgcatgcgtaagcattaattaaggtttaatgttgttaattgtatatatattgttgggtagaacaaccatttggattttggagtggggagtactgcaaaaacgcaacgtactaacttgcagcgttctattcgctctcttgttttctctgcgactctgatcatctgtaccaccaaacagtggtctgttctctctacctaagataatgttagttaaaggagcattcccggtaatgatg

SEQ ID NO: 321 - DNA, 742 bp, Citrus
ccccccgcggctggcaggaattctggcacgaagggtaggtttcagggactctgatgaacaaagaattaaagctatacgtatttctgaaaaacaatggaagcgaatttcgataccaattgctacttcaacgtgctgccagaagagtgtgttgcgactgttttctccctcacttgtccgttagatgcatgcagatcatcgcttgtttcttcttcgtttcgatcggccatggactccgacattatctgggacaagttcttgccctcagattggctcgagatcgtctccaaatcagtctctcccctcgcattttcctccaagaaggagctcttcgctctcctttgccacccttttctcattgatgccggcaagatcagcttcaagttagagaaatcatcaggcaaaaaatcttatattttgtctgcaagagctcttagtataacgtggagtagcaatccaatttattggagctgggtgtccatgcaggaatcaagattttcagaagttgcggtgctgagaacatcaaattggttggaaattgaaggcaagatcaagaccaaaatgctgtcacaaaacacaatgtatggagcttatcttataatgaaaataagtgatagagcatacgggcttgattcagaagccgctgaaatttcaattgaaattggtggtcgtcaggcgtccaaaaggcaaggcttatttgggcagcaagcaaaaaagtgatttcatcagtgctagtggatggcat

SEQ ID NO: 322 - DNA, 338 bp, Citrus
ggcacgagcttcactttccttacaacctttgctagtttcttccgccacttgttgatttctctacactgtttaatcatacaagatttgatacacagaaggtattcggagaaaattgtaccaccatggatgactcttctgcttcatatattcatttggtgcaccatctaatagaagagtgtcttgtattcaacatgagcaaagaggagtgcatggaagctctctccaaacatgcaaatatcaaacccgtcatcacatcaacagtgtggaaggaattggagaaagagaacaaggagtttttcgaagcctacgcagaaaaaatgcaggagagctacagtaat

SEQ ID NO: 323 - DNA, 804 bp, Citrus
ggggatcacataactcaatcctcacttcatttgctcataatttcaaaggtcagagagagagacatggaaggttcatcctcaaatcatatgcttaaatactttctcattttactagccattttttcctacttaaattcaagctcagcctctagacattgcccctctaaaattgctgctgacagaaggttcatcaaaacatcttgcagttcaacaacttatccaacactttgctataaatcccttgctagacatgcaagcttaatccaaacaagccctaagctcctcgcccatgcatccctcaacgtgacccttgcaatggctaaatcaacgtcagccgtcatgttaaagatgtcgaaaagccctggaatgaagcctagagaggtggatgccatgcaagattgcttggaggagctgagtgattcagttgatgagctcagaaagtccattggcgaaatgggtctgatcaaagcttcaaattttgaacttacaatgagtgatatacagacttgggttagtgctgctttgactgatgagactacttgcagcgatggatttgagaagaatacggtgaatgggaaagttgtgagggcccagattgtgaagattgctcatatgactagcaatgccttggctttgatcaatagttatgcttctcttcgcggttagatattctcatgattagctccattattgtaagtgatttatgcagtattaatcctgcctgtggagatcagatttatgaaaatgtaatctttactgcaagcaaataacagatccagaaaaaaaaagttggatttatctgaa

SEQ ID NO: 324 - DNA, 807 bp, Citrus
cgtctctcattttttttttataaaactaataaaacaacatgctttctgagacaacgaagcccagtcacggtcactctcaggcaccaactgaagaagagaggcataagaattataaagagctcgatcgcgaaatcagaaacatggtcaatgcaataaccgggcgcgttactgatcatcatcataagcctggttcttcaagcctgctccaccatgaagaggacgatcatgaagatggtgtcagaatcgttacgcttgcgggaagcaacaccggtgccactatgcgaaccgagctaacgtcggatgataagctcaatcctcatggtcatggtgagacagagcctcaacatgagccgctgagtagctatgtgaacagcaatttccaagctgttaataactcaatcatgctgagtagcagctacagcaccaatgatcccggtgttcacttggacatcactgatgtttatgcccacaaaccagctgacaagcacggaaagaaggcgaagaagaaagataaggaaactttcaagagtgaccatcacactgatcagcattctgattgacctcatctatgagcgccaaaaatatgcaaaagcacctacacacacacagacatcgaacaagtgcgcgtgctcaacaactaccgtcttaatagttagctatatatacaaattatatatctctattcatataataataagtcttttgcactacactgcttgtttaatattccatctcgtttgcaaatttcttaatttatggtcagctgagtgtatctatctatctatagcatttggaggctataaaaaa

SEQ ID NO: 325 - DNA, 804 bp, Citrus
gagggatagaatactgtgcgagagatggaggtggtccaagtgcttcacatgaatggaggagtaggagccacaagttatgccagtaattcactggttcagaaaaaagtcatatccattgcaaagccaatcacagaggaagccgtgaccaaactcttcagcagcacgttcccaacaaaggtagcaattgccgacttgggatgttcttcaggaccaaacactttgcttgtggcatctgaacttatcaaagtagtgaacaagatctgcgataagttgggcagtcaattaccagaatttcaagtgttcctgaacgatcttccagggaatgactttaacaccatattcaggtctttatcaagcttccaaaaggtactgagaaagcaattagggtccgcctctggggcagctgggcattgcttcttcactggggtccctggttctttctatggcaggcttttccctcgcaatagtgtgcatcttttccactcttcttatagtctccaatggctatctcaagttccagatggactggagagcaataaagggaacattttcatggccagtacaagtccgccgtgcgtgcttacggcatattacgagcaatttcaaagagatttttcattgtttctcaagtgtcgttcagaggaattggtggcagaagggcgcatggttttaacatttctaggaagaaaaagccaagatccctcaagcaaagagtgctgctacatttgggagctcttggccacggctctcaacaatatggtctccgagggactcatagaagaagagaaagtgaattgtttcaac

SEQ ID NO: 326 - DNA, 609 bp, Citrus
gtttttgtttacagagtaacaataaaaaaaaaatgaggattcagatgaagatattgatgatggcttgcttggtgttatgcctcatctcaacagcatacgctgctcaagggaacgctgtttactatgaccctccttacactaagtcggcctgctatcaaaaccaagaccacgggacgatggttaccggggtgagcgacgccctgtgggatggcggaagagcctgtgggaggaggtacaaagtgcagtgcgtaaggggtgcgaatacggccccgcatccttgccatgatggagcaagtgttgaagttgaagttgttgattattgcagacagccatgcaatggagttcttaatctttctaaagatgctttcgccgtcattgctgatactgttgccggaaaagttcaagttgaatataacccggtttgagctgcttacacgagacaaaagcacttctcagatgcgaaaatgattatatattttaaataagcagctattgatgcaacaaatatattatgattgagcatatgatataattatgtaatctttgttggttatttacgaccaaaataacaattataaaaataaataaaaattaccgaacttgaaaaaa

SEQ ID NO: 327 - DNA, 829 bp, Citrus
tttttttttttttttttatgaagcaattttattagtaaaacaagtaattagtacaaatatgcatttaattaaccatggagagtagaagtaactcgaagtattacagcaaacaaacacgagtatcacatgcaacggccgaaagcaaagtgtgtgaattccgtccattggtaatttcacatctcaaataaaaaaaaacagtagcagcgaagtgcttattcatcacatgcatgcaaaataaaatttccattatctttatatgtatgtaaggtcttaattaatacgaacgaaccggcaggggactcagggcagcttaatcggtgcagcagcgatacataatgaactcctccatgcgacggccgcattcagcacacacaaccttctccggaatgcggccagcctctccaggcaagatgaggcggttgcagtgatgaggggggcggttttcattgagataatcattcatagcaacaacgaaactcttttctgggacatttggctcccacgtggtatattcagtcaagcatttgagaatggtttcatccttggccttagccatgtgtggtcctctagaaatgactgcccatccttgatcactcccatcaaagctaagcattgtcacaatctcttgcattatggggtcttgttgcactttccttccgaatttcattttggagtgccacatgctttcgagcctcacccagaagaaccaaatgagagtaggatctggcaatgtgtggctaagcttctccacagtgatggtactaatgcttctccggactttttctttaggattgctcttaccaacgtagagcatctccaacgcaatgcc

SEQ ID NO: 328 - DNA, 707 bp, Citrus
tttttttttttttttgacacacaacagattcttagattagaaagtacagtaatagaggaaacatgaaaatcatcactacggcctcttaatactctcacactcaaatcttattattgcaaacttacaacccaaaggaggcaatcataccatagtattagtaatactgcatcacacacaggcacacatataaatgtatattttggcggcataattatatgtgtgtatcggcatttgatgtttactcgtcacagcaacgatacatgaggaacttctccatgacccgtccacattcagagcaaataatcctttcaggtatcttgccagcagtgcccggaagcacaagcctgttgcagtgatgtggtgtgtgaagctgcgcaaggtgatccctcattgctggcataaacccctttggctccacttggcctttccactccgtattatactcttgcatgcaagttaaaaatatagctcccttggcacttgccatctcagctgaacctctggcaaacacagcccatcctccttcactggagtcgtacgtcagcattctcataatttcctgcattacatggtcagtctcagcgtttcttcccagctgaacttttgagtaccacatgctctccagcctgacccaaaagtaccaaattgaagttaagtcttgccagatgtggctcagcttttccgaatcaatggtatcattgttcctg

SEQ ID NO: 329 - DNA, 683 bp, Citrus
tttttttttttttttttagtaaaaatcaagaagccaatcttttatttttaaacccatatggtttacaatccatttattccttccataacatatacactgctcgttacaaacactgttattctgaaaaatcattaacaaatatagaggccaaaaaaaaaaattaaaaaaatacaagagatcagacccaagtcaccatacaaactaaccaaataatcaatcttcaagttcgttaaaatgctagaagaagagatgaagcagcaaatgctccaatggtgctggcaacattaacgaatgtggaagaagcagcgttaggctttttattaggttcaggagctggagttggattaacctcaacagttccttcaggcggagaatattcaccagcaggggctggagctgggactacatctgttgaaggtgaaggcggagaagatgggctcattccggttgttgtgtttgagaggtggttgcttctgtcagccaagacgatcaccgctagcttttcgttgttgacacagttgtctttgttgccgctgatgaagtagtaaggcccggattgtttgaaggtgaagacagtgtggccatcggtgtatcttgcgacaggatattctgtgctacagtttgtaagcatctttgttcacttgaagcactgagtcttgccctgatgcatagttgaacactat

SEQ ID NO: 330 - DNA, 344 bp, Citrus
tttttttgataaagatcatatagaaattttattccaagttgtacataaggaaatgggaaattgaaatacaaactctttattgatcacagtagtgatataggaatcaagatctaggctttctcccctgaaattagcagcactcattttttacccgaagttgacaatatatatgtttattagcagaacgagcagaaaattcttagaaaatgcttagcttagcaaaatcaactgttttcttcccatcatgagcttttctgaagaaatgcttcacataatccttgtataaaacttgcttataaactggcttctccccacttgcaagcacttctggaaaaggacccctc

SEQ ID NO: 331 - DNA, 662 bp, Citrus
cgattattctttttcattgaacatattcacatgcacatagtgctattgggcaaaagaaaatgttgcaaggacctgagtccatcatcaacagtgacatacctccaatttacaatactcaacattcccacacacgctttcgcaaccctaactttctcatcttcacaaaaaccgttgctactagaaaaccctaacctcaaatctgcaacaatcccactagcagcttcactagaacaacacctcggcgacggcagctcctccgaaaaccacgactcggacgccgccggagagaaactcaccctcccttcataatccatcatcgtaaaaactcctccccatccacgcaacaacacattccatgtgattcccacctcctcttgtaaatcgatcaaaccaaagctacgaaaacaattcacgttaatatcgatatcgaaccagaacacgccactcgtgtctgcacaacgtaattcgtttgcaggttttgccagaggtaatcggaggacatggcaatataccatgatttggacacacatgaagctatggctagggttttggggtcaagatgctgagcaacaagactgaggacctcccatggcggaaaatttcttgaggaaaggcgagacattggatttcgattgctttttttttttttctttttcatcctc

SEQ ID NO: 332 - DNA, 869 bp, Citrus
  misc_feature (721)..(721): n is a, c, g, or t
atacaaatttattcttctatcttgatacatttgcacaaaagaatacaattgctttgccactgtacaagccagagttgaaacaataggtttctttcatcaagattacaaattttattatgaatatgaaaatacaaagggaaacaaataacctctacaaagagcaaaagaaaggcaaccatgaattggcaccttatgcaaccggcaacatagaggcaactccagcatttaagagcagtccttcaggctttatctgaagagcaggactaattgtaagcaagccaatgaagcagtctaaaggaagtctggttccccatacattgatagactcaagtctgccacatttatttactagaaaaagaagcccattccctgtaacctgacggcagctccacaggacgatactctttagttgtggacagctatttgcaattgcatacaaagattcatcagtgataaatgtgccgccaatattcaggtgttgcaaagaactagctcttgatatcagctgaacaacacctttgtccgtgatcccggtcaaaccccatagggatatggatgtgaggttgctgatacacttagcgaaagacattctgtacagtccattgtcagttatttgacaaccccaacggctcctcgaaatttcaagttctttgaggctgtaggcatagccaacaagacgggcagtagaatcatcatccattttccaaccagcgaagctcanattctttcttcgtgccaaagactgcttcacccccagtttccatttcttacaaacactactcacctgggctaaatgagtgaaagaagtgatcaaaccgaagatatgagccaacaggtctatcggcaatctatcaatttctacctctccc

SEQ ID NO: 333 - DNA, 749 bp, Citrus
tttttttttttttcataatttttttattgacatcaatttgcaattagcgcacacactgtggccattggcatcacaaattctcacacatcgaatcttattacatatcataagaaagatggaatactcaagcattatggcaagagtaacatgtactaaaaagaaattgatgcagactcaaaacagtgagcctggaacgtgatcatcatggcagcagcaaaatgttgtgaatttctccatatagcggtggcattcaggacaagtcatgctcgctggaatcgtaccggaatgagcagagaactcaaaacggcaacaaggatgtgcaactccatgaatcttctggtgatggtcaatgaatgaatcatcaaagcctttaatgggcacctgctctttccaaatatcatactccagtaatgtgggcaagactgtggtgccatgtccattcactaaaacctgagaccctttgctcagcagagcccatcccccatctctgtcatagctgagcagtttcttgatttgtggcaccatcggatcgtggtgatcatcagctcggcctagttgaatcttggataataacatgctctctaaacgagtccaaaagaaccagaccattgtcaagtcttgccagaagtgaccaagcttttcaactgcaagggttgccatgattcgccgcacttgctcccttttggtgctcttccccacatagaccatctctaagggaatgcgtgcagtatttgcaactgagcgagccg

SEQ ID NO: 334 - DNA, 655 bp, Citrus
aaatttccctagctataagatttctcctgccatttcccccttcagaatagcctccacagggtctttgcttaccgcaacaatgccgaaaaacattgggtttttgatctgtctcttgatcatggctcttgacattactgctggcatacttggcattgaagctgaagtagctcagaacaaggcatgtttaagcaattttaagttgaaattattgtttcagcattttgataataataaccctgagttgttccgtcaacaggtgaaacatttgaggctatggattttcgagtgcagagaacccagtcacaaagctttcaatctagggttggctgctgctgtgcttctggctcttgcccatgttattgctaatttgcttggtgggtgcgtttgcttctggtctagagaggatatggcaaaagcttctgccaacaggcaactagctgtgttttctctcatcttcgcttggtatgtggtctcatcctctgataatttcatcatcacttctaagaaaaatttaccccaaaatttattatatcaattgttgttaaataacaggatcacactagcggttgggttctcgttgctaatcataggaacaatggcaaattcaaaatcaagaaaatcatgcgggatagctcaccatcgtttcttctccgta

SEQ ID NO: 335 - DNA, 651 bp, Citrus
  misc_feature (544)..(544): n is a, c, g, or t
  misc_feature (595)..(595): n is a, c, g, or t
  misc_feature (614)..(614): n is a, c, g, or t
ctcaatttcacactctttatcttatctgcagcttctctagccccaacaattctcctcaaaatgccacctacttcttttggcttggcattccttatggtctcttgcatctctctgctctcctcctttgtgggtttctactctcagctcactcacttctgtttcataacccacgtctcacttctcctcgcctcattgatggggcaattactcagcacactggcattgttcaccagagaaaaatcaagcctttcgatgctaaagtcagaacgtgaccccaaagaggctaaagtattggtgagattagagtgtgggattttgatggcaatgttcctaatgcagttgctggtgttgatattgagctgtgttatacatagctgttgggtaagagattatgaggagatagaagctgagagagaggcaatggcaaagaagaggagcaggaaaattgctcaagtgcaagaggaatccatggcaaatgcagccaagattgctgaggttaaagccaaagaattcgatgagaagatgaagagcaagtatgggcagngggtcaaaaactgattttgaaggctgaactcaactgaagcccattattcangtatcttatcagctatttngattacttttatatgtacttttgtgggtttgggcacc

SEQ ID NO: 336 - DNA, 730 bp, Citrus
  misc_feature (576)..(576): n is a, c, g, or t
  misc_feature (615)..(617): n is a, c, g, or t
  misc_feature (648)..(648): n is a, c, g, or t
aacaaagccaaaaacagagtacaagattcttcacaaaccagctagccagttacgttttagcttttgctattgattcactctcatggcagaaaacattgttaaagtaaatgaggttaccagagtgacccctctcgccgaccctagctcaaccaaaacggcgccgttcactcttcctctcacctacttggacatttactggttcaaggttcttcctgtcgaacgcctattcttctaccaagtcactgacttaactcgcgatttcttcgactctgtgatcctcccaaagctgaagcactctctttccctcactctcctccattatcttccgctcgccggcaacatcatgtggctcgaaggtacccaaaaaccagccgtttacttcttccctgacaacaacgacggcgtttcagtcacagttgctgagtcctcgtccgacagtaccgatctcttcagtctcctctccggcaatggaatccgcaaagctgttgaatttcatcctttggtgcccaatttgtcgatatccgacgataaagctgagataattactgtccaaataactctgttcctcaaagaagntattccatcggtatcacatctcaccatgcggttcttgannnaaaagctcaactttgttcgtaaaatcttggnttatttgtgcaaacacttgcaacaaaaccccacttgtttgccacctgaactaactccatttttggaccggaatgtcatcaaa

SEQ ID NO: 337 - DNA, 780 bp, Citrus
gaaaatggagcccgcccagatccaacttttattataaatgaagaatacatccattgtgagagcacattacagataaaagataataattcacccagacaaaaaatttctcctataggagaatcgtctagccccattccaacaagaaaaataacaatgactccttattgaccagcagaatcagagaaaaggctaaacccataacctcaaaaaagttttattggttgcccaaaaaaaatgccaaaaataagatcatcatgggaatagaaagccgaaccatgctgctataccatataccccacaccaaacatctattcttagagtttcttatacataatataactcaactccagttgttcatatccccttgttgcctcaactaatatttttgtcataatgcccataaaccctctagttccagcctggcagtgagccagttaggaacttcatccatctcttcagggactgtgtagtgacctatagttccagcctggcagtgagccagttacgaacttcatccatctcttcagggactgtgtagtgacctaccccattatagcatctaaatgtaagatctcgaaatccaacggaatttaacatctgtgctgatctctctccgtgtttatatgcaaccacatcgtcacctgaaccatggcagagcaagatgggcaaagatgccacacgccttgttgcctcacgcgatccttccattcggcttttcagggtcctaaaagaaaaacggaaaaaagttgcctatattaatgaattggttaaccatcctta

SEQ ID NO: 338 - DNA, 715 bp, Citrus
gaaaaatttcagtagaaaatataatgggccaagccttgaagacattagcttctggaagcgaggaaaagaaggtcaaagagattagtccaatagtagaacaatgttatgaagtttacattgctggtagcagaaaggctctgacctcagcagacttctaccaagctgtatgccaaactatcgaagaaatcaacaaaagtcttggcagctcacagttccgtgtaccccagactgaaacacttcaggaagcttatgagaagcaccacaaagggaaaggaaaatcattgacgaaggacgaatttgaaaagataattaaagaattgatagttgatacaggattaacaggttttggcgcaaaggatataatattttacatgtttggcgtaccaattacagcactgtttataaagcaaagggtagcgccaaaagcagttcctaacgatatctttattccagttgtcacttcggccactgtcttccttctcgccaaacttaataagatatgaaattatgaagcatgcgccgcatattggtttattactgttcaaacggtacgattctcattagttccagtcagatgacaaattaattgaattttttatatatttatttatgatttggatgcaatgtacaataagtacacatgttgctttgtcgattaactttgccgctaataatgattccgagttgtgatttgtgagaaaaaaaaaaaaaaaaa

SEQ ID NO: 339 - DNA, 361 bp, Citrus
aagattggtgggtatgtgagcccatcatcaaattatacggcagatcagaggaaggttcttcagatgatgagccttgatgctagaaaatcagtgtctcaatatgttgagaaacatggatgggaagctgtcgagcgggctatcaaagcggctgaaaaagaaacaaagaagcgttgaggatctccaactacgtcatcagatcagcctcgcattctcttcaattataactcttatgtaaaatgtaaagatggaaagatgccacgagctagagcatatattccaattaattaattaatttgtgttaccaaagagaatgagatgaatttgttactgtaaaaaaaaaaaaaaaagggggggcccggta

SEQ ID NO: 340 - DNA, 672 bp, Citrus
ccccctcaagagatgctctgtgcaaatgtcggattcagaagccaaacagctccccttagacgaggactgaagcagatgagaaaagattgaagtatttggatttcgtacaagtagcagcgatctacattatagtgtgcttttcaactgtatacgaatacgccaaagaaagctccggcccgctcaaaccgggcgtccaagccgttgaggcaaccgtgaaaaccgttctcggccccatttatgaggatctacacgacgttccgtttgaacttctcgagttcgtcgatcgcaaggtggaggaatctctgggagaattagagaggcacgtgccttcactagtgaagcaggcatcgagccaggcacgagccatggcttttgaggttcaacgcgtcggtgtggttgacgctgcgacaacgattatgaacagcatgtatagtaagtacgagcaggtggccgagcagtacgctttgtcggcttggcgctggctgaatcggcttccggtcttcccgcaagtggctcagatcgtgatacccacggctgcttgctggtctgagaagtataatcaactggttcgttgtacggaagagaggggatatcctatcgcaacttatctaccgttgattccaacagagaggattgctaaggtgtttgacgagggacccacgcccactgttc

SEQ ID NO: 341 - DNA, 855 bp, Citrus
tttttttttttttttttaatgaaataccatttataagtcacggtcaataacgaataaaatattttacaagcaagcaatcaaatacttattacagagcattggaaactccatggacagtcacttctgcttccaccgagcacacatccttcactaggcagccattgcctggattattgaagtaagcgaatgaaacatatcttgcccacccactttctgggttcgaggcactgaaccagaaattagctttaccagctatgtgccgggcctgcacctgatccaggagtcgcacagtgaactctgcataaattttggaacctggagtaagagttgttgaatctgccagagccaagtacatagctagatgagtgccggttccatggcgccgtcccgtaggatatagttgtatcttccatttctggtctccagaattgaatacttgtgagtcacaacattctgagcgtaactttgagaagttgtcgatcctccacacatgcttaatactgggtgcatctttgatcattgacaagcactctcctttacctgtgcttctttctttactaacaaatacttctgctccaaacacacacgtgtcctccaagaggaatccattagaagcatcattaaaagctttaatggggataaattcatcaaatccccattcaagctttaacctatgaaaccgcctttcgattcccatggcatcttgaagtatcaagaagttgcccttgttttgatcaagcaaaaacaatctgaaaactgcatagacctcccaaccatgctggagtgagcttgtgttttccattgctaggtagacagaaatgtgttctttcacgttcttgcttttatttccagctg

SEQ ID NO: 342 - DNA, 438 bp, Citrus
gttgagcacgttggaggcgacatgtttgatggtgttcccgaggctgatgctgctatcatcaagtgggttttgcatgattggggagatgatgaatgcatcaagatcctcaaaaattgtaaagaagctattacaaaggacaaagggaaagtaataattgttgaagcaataattgaagaggatgatgaagtagacaacaagtttaagtcagtaaggttgatgctagacatggtgatgatggctcacactaacaaaggcaaagaaagaagcttgaaggaatgggactatgttcttcgccaagctggatttagcagatataacatcacatctattcatgcagttcaatcacttattgaggcttttccttaataaatattaaatacattgtttggatctgaagaataaacagaaatcttccataaggttttgagatttgtaata

SEQ ID NO: 343 - DNA, 735 bp, Citrus
agattatattgctgtaaaaatctcagcaaaatacattcaaagagaaggaaaaaagaagaaaaaataatgaaataatttcacccccaaaatacctaagcaaaaaatctcctatctcctaaactccaacaactaagctggtctaaaattaaaatagaacccaagccagtgccagcaccaaactagccttaaagcttgcagcactgcttgtaggagccacggccggaccatcgaactccatcggagcaggtgccggagaaatgccagtgtaccttctccttgaagacatcacgacaacaatcaacttctggcctttctcacagcttcccttggttccactgatgaaatagaaaggcccggatttgttcagcttcacattggtgttgccatccctgtactcagcaactgggctgcttgtgttgcagctgaggtaagcttcttttgtcacttgcagcactgagtctctggtggcatcatatttccacactagagaatccccgatttggaagcgagttttttcagcccattgattgagggaatcagattgtgaagaggggattttccaagaatctgatttgccaccaaccaagatgtctcttgcttcgcagaagctgatgctgaaaagaacaagtgatgtgagcaccaaagaagaagaagctagggttcttgaaaagccagccattgaaactgagaagatgaaagtgtctgtgagtgctgtgattctgggagatgaatgta

SEQ ID NO: 344 - DNA, 729 bp, Citrus
caaaaacaattagcaacatgcagttccctctctccataatttctagcctcgtaacagtcttaaccataacactccaggcacttcccatcttcacactcacaacttgccgcagtttctgcggcaacatccctataaaatacccgttcggcatcgacgacggctgcggcgccgtgcagttccggcacatgttaaactgcagtgctgacttgttcttcatcacaccttcaggaggctacaaggtccaatccatcgactacaacaaaaaaacactaaccgtgtatgaccccgcaatgtccacatgctcaatcctacaaccccatcatgattttatcatgactgatattcaatcagccatcatgcccccatcagcggacacagtctttgctctgctaaattgctctatagactctcctgtactcaatcattacaagaatctttgcttcaacttctctggccattcttgtgacgagctttatggagggtgtaatgcgtttagggtttttcatttgctgagtaatagctctcctccttgttgcttcactggctatgacaccgtgaggtacatgagcatgaatattttggactgctcgcattatactagcatcattaatacggacaatttgaagggtcttgggccgttggattgggtttatgggatcaagctgtcttattcgttaccggatactgggtgtgaacggtgctcggaaaccggtgggacttgtgggtttg

SEQ ID NO: 345 - DNA, 920 bp, Citrus
ttttttttgacacaccaacctaacttttcattgatataaagtcatagataatatcattttcatgcatgaaatgatagcaagattccaagctaaccctgtcacaataagggagttttcaaggaaattaaactgccccagtatgtgtgttatagataaaagtctacaaactccacaaactattgcttcttgcaagcctctataaaattatttactgaatctttaattagcttgtctcatttattcctccgagatttcgagaactttcttctcagcctgcacagctctctcctctgcttctttggcttcactaccatcattagctctcttcttagactcaagaaactcaatcaggccacttagtgcaaattcaggcgcctcattcctcatcagctgctcagctacatccgcaggagtcacctttgctgtcgctatcagcttttcaatctccacgaaaagtggatgctctgcgatcccaaggtagttggaggccagcattttgaacccacttggagtgcagtgggacatgttaatgtgcatgtccatgcgaccggggcgcaacaaagcagggtctagcctttctttatgatttgttgtgaatattatgattcgctcatctccacagcttgaccacaatccatcgatgaagtttaacaatcctgataaggttatatgatactgtttttgttgttcatatcctgctatgagaaaatcaggatttgcagcccttgcccgcgaaagcctgtcctgcaactcaatgcagcaatcaatgtcctccacaaccagaatggacttgttctctgtggcaatcaaaatatgccttaaatcattatttcccagaagattagacaactccaagtcatagacatcaaatttgagataattagccatggccgcgattaagcttgatttgccagtccctg

SEQ ID NO: 346 - DNA, 749 bp, Citrus
ttaaaacataaaaatttggaaattgataaattaaacttgattacaagttcacccttcaatccataacttattgtcctcaaaactaaggaaactaaacaatggggaacccaagggggggaaaagggaaaaatgccaaagtgaaaaaaaagaacaaactctcacaattacaagcaatctattcaaataaaataacattatcatccctcctttttgcctaaaccaaatgctttatgtttttttttttttttccttcggttacttcttggtttcacttgagtgatgacttgtgtgccaagcttgttgaatgacctatttttgtttgaaccagctggaaatgtaaaaattgcagtctaatgttgctcacagaacctgacttatatctatttatatatttgaatgaaaatggcatgacaaactcagagaggcttgtgccggtgttatatctatgtaacttagggatgctagcattagacaatggtgccaatgtagccaaatcctgcgatcaagaaggtaattgtttggaggaagaggtatatgaagtaattgttcttcccatggacaaaatcatagcatccgcagaagaagaggaacactccaaatcccagctccaaagtatgcattctctcagcaaatttgattttaggtttttttgggagctttggtatttgttttgttcttcgcttcagctgccttgttcttgagagcctctccaagtttttcggtgacaacccattcattggcccttccag

SEQ ID NO: 347 - DNA, 511 bp, Citrus
ttgttgacctctactttaacttggccgccggtgaaggagcatacttgcctgacatttgccaggctacccgcagcaaccctcaccgttcaatgcttcagcttttgagctccggcggtgacggcaccgtcagccttgccaccgctcctgcttcttcccccgttggcttttccaaatcaagaaaaatcttcatcggtgctccagctccgtctccagcataaatttagcaccactgctgtaatgcatatatatatatatatatatatatataggcatgctgtcacgttgtgtacatcgtttcaacaaaatcattctcgttaaaagggtgtgtggtatatcattgaggaatcatatttatttatttggcagaacaatttgagagagttaagagtgaatttgagttaattgttttctttttattcattttatccttttccagagtgattttgttggttatctttttttgtaataaagagtttcatttcttacgcacaaaaaaaaaaaaaaaaaaaaa

SEQ ID NO: 348 - DNA, 652 bp, Citrus
gcccgttgaagctagccagccactcccaagctgatcgccgagcgagctctaacgacaaattaaagaccaagttctgtgctggtggtgatcagctgcgatcggatcggatcggatcatggcctcagcaggaactgccgatggtttcttccggtccatctacgaaggttgcctctccggctgtgacacgggcatcgaacgccggccgtaccatcggtattgtggctgtgctttgcatagcaagtccaagaacaatcaccgcgtccatgggttgccgcctacatgcaaaggtactgtgtcctatccaatgagaaggtcttatagtgaaggcagcttattggtcttggcagcggcttcttctccaaagattcagttgggatcatgtcatcctgaactggatgatgatcatcataacactatttctttcttttaattccctttgtttaattaaatatttgtgtctttgtttttgtttttaataattggttcccatttataaatatatatctagtcgactaagtcgagagatttaatctgggtgtcattcgtgtcatgtcatcagagattttatttttttcacatattatatgtattattatgtgtgaatgtgagtactgttgttgctgatcgtgaattaaaatgtattgctcagttc

SEQ ID NO: 349 - DNA, 893 bp, Citrus
tttttttttttttttttgaatttataaaacctttgaaaaattgagtaaaaagcatttcaggctaacaccataacattttaaccatacatgtctatggatatactccatttaaacatttctaagatgtacaaataaagaatccgcacacttttctcttcttttaatctctctgctcactcttgcagtcataccagcatgactgatcatgtattaaagagacggtggatcatattaagggtgatgaccaacagctttgccacaaacaagaatattagaaggaatgtcgtactcattagcaaggctgtggaccgcattccaaaccttgagataaaattgttgcccaagatactgcctttcccaaattgcagacctcatattccacattccttggttgtccaaggacaccaatatagcagtccaagactgtggatatacctgagcagtgtgtctagtcagagtgtcagcaagattgtaggttcttctcttttcggctgcccactgtccagacccatacccaacaacccagaaatcataaccatcaagatgccaggattgcatcgtcttttcattgttttgaaacacaacttcaatatattcgtggaggttgacttgcataactgaggtggctactgatgaagcgccaccagatggaacactttggatagaattcacactgaaaattccagggatgttaaagtaatcggcgagcttcagaggggtatcagaatttacataggagataccattaactgcataacgcagctttccgtttattaaaggtgctgagttagcccaaacgatcgtccttgttgtgttaatctttccataatggaatgaaccctgaggattaggcctggcagcatttgccgtcaaattccacctgaaagttctag

SEQ ID NO: 350 - DNA, 821 bp, Citrus
tttgaagtgccaacagccctttgaattctcatctcttcaggaaagattttttcagtactgaatgtgacagatctttgcaagcttaaccatgtcaagaatatacctttaagatcaacctattggaattggtcatggagttgatgcaaatcaatgctgttagttggaagcgttgttgcattccgcaaagtatagtaattaacccctataaatcataggctcctttaaccaaatctttcttctcttctgagaatcttggaaatccatccctaaccaaagccttcataggaaagaaatggctaatctccatgaacaaatggatatatatacctgaaaaagaattctaaactaatcatccaagagcaagcctgtggctctttctgctgcctccttatcgtgggaaagctgtgagtgaggctcaaaccattggcataccagtgaaattccaatttctccatcttgaataggctataaaaggaaactactaaatctgatctcacgtggtgcaaaaattaactcgaaggacaaggttggttgcacagcattgcaccggggagctagtacagggaattcagcattgtgtgaactcttaattgaagaaggagcagaggttgatgctactgataaagccggacaaactcctcttatgaatgcagtgatttgccataacaaagaggttgctcttcttctaataagacatggagcggatgttgatgtggaagacaaggaaggctacactgtgctgggtcgggcttcaaatgattttagacccatactgattgatgctgccaaagctatgctggaaggatgaattcttagtttgt

SEQ ID NO: 351 - DNA, 541 bp, Citrus
gataactctaacccttaaaaaatcttattctaatcaatctttcttctatactctttttagtacttgaagagttatagtagtttgaaggaatttgttgcaatggaaaatcaagttgtttcaatatccatttcacatgtaccaccggctcatttcctactcaaaatacagacattttcgtcccttctagaaaataaagtggaaagttatgaatcttcggaatttaatgttggaagccacaaatggaaacttgttttgtacccaaatggaaataaaaaaaaaaaggtgaaagatcacatctcactctacttggcaatggcagactcaagttcttttggtttcggttgggaagtctttgtgatttttcgcctgtttgtgcatgatcagaacgaagacacgtacttgattcctcaagatgcaatgggaaatgaaagacgttttcatgggttgaagcttgaatggggttttgatcaattcatcccgcttaaagaatttaacgatgcgtcaaatggatatcttgtgggagatacatgtgtttttggag

SEQ ID NO: 352 - DNA, 709 bp, Citrus
tcctcaccttcttctccggcccctcagcccagcggtagtactccctctccggttcctgcaccagcgcggacaccgacaccggcaccagcaccagcaccagaatcagcaacaacacctacgccagcaccagcatcagcaccaacaccaacaccgagatcagcaccaacaccagctcccacaagacagccagcgactcatgttgttggaggtgctctaggatggactgtccctcccaacgcttctgtgggttaccagaattgggctcgcaacaacaacttttcggtcggagacattctagttttcaactatccggctcgtgtacatgatgtggtcgaggtgaccaaggcagcatacgattcgtgcaattcgagctccactatttctaagtctacaaacccaccaacaagaatcactctcggaaccgctggggaacactacttcttttgcactttccccggccactgctctgcgggccaaaagctcgccgttaacgtcaccggaggcagcagcactgcgcccagtgcctcgccgccatcacccaccgccactcctccttctactacaaccaatcctccaccacaatctccgggaggcggtaccgcacctcctccgcctaatagttccgctaagtctctaggcgctgctagcttatttacgagtttccttgttattgttgcgggtttattgtattagacatggcggtatagag

SEQ ID NO: 353 - DNA, 859 bp, Citrus
ggggagatcagtcatcagctcccactcactctctacattcatctcccagaatcacagcactcacaaacactgtcatcttttcagtttctcaatggctggcttttcaagaaccctagcttcttcttctttggtgctcacatcacttgttctcttcagcatcagcttctgcgaagcaagagacatcttggttggtggcaaaacagattcttggaaaatcccttcttcacaatctgattccctcaatcaatgggctgaaaaaactcgcttccaagtcggggattctctagtgtggaaatatgatgccaccagagactcagtgctgcaagtgacaaaagaagcttacctcagctgcaacacaagcagcccagttgctgagtacagggatggcaacaccaaggtgaagctgaacaaatctgggccattctacttcatcagtggaaccaagggaagctgtgagaaaggccagaagttgattgttgtcgtgatgtcttcgaggagaaggtacactggcatttctccggcaccggctccgatggagttcgatggtccggccgtggctcctacaagcagtgctgcaagctttaaggctagtttggtgctggcacttggaggtcttttggcttgggttctgttttaattttagaccagcttagatgttggagtttagggtataggagattttttgcttaggtattgtgggggtgaaattatttcattcttttttcttcttttttccttctctttgaatgtggaattttgctgagatttttacagcaatataatctattgtctgtttttgctatatagaatccttttggccattgctatcgaaaaaaaaaaaaaaaaaaaaaaaaaaaaa

SEQ ID NO: 354 - DNA, 776 bp, Citrus
tttttttttttttttttaagaaaaaaaggaaccttgtctaatttacaatacagattataagtagggagtgataccttacgtaatacgcaacaacttttaaaaagtttttctcaacacgatttgcttaattaatttaatcaaatatcaaaggggacgaatatttaattttccagctgatcatgcatcgacgtcggaatcgtcatagtgatggtaccagctggagtataaatcatatggacccaaaaaagccgtcttcttcaggatcttgggaatgctgaattgcttgccaaaagttggctttggcaggctcttcccctgcctgagggtacgtttctttttcccattggcttcttccaaatcatcttcctgattatcatgatcatcgccacgtgcacccatctcgatgccatctttcaccttgggggcggatctttctttaaccgagtccattgattttgttgggaacggggtcttgttcttgtaaatcatgtaaaaaatcaactgagctgcacccaagacgaaccctacggcatttggcactccgatgtaaatgtctttcacaagcactgaataaactgaccatacgccggcattgagaaataggaaaaatgagagcaaaaatggcatgtacttcacactctttgtccttatcaccgttgtcatgactgctagaggagatgcatacatgccaatggttaatgcagcgcataagattccaacaaaagtaagccgcaaatttccatgcatggctagaagtgttatcgcaatcactgccc

SEQ ID NO: 355 - DNA, 721 bp, Citrus
gcagaaatacaacatcgaatcaaaccaatgaatgaatgaaattataatcggccacggcaaaatgaccaaaatgatcatactagcaaagacataataatgatctaaaattaaacttggaaaggccatggccaatccttcaaatcctcctcttgagccaccttggcgctcctcctcacagcaggggttccattaccaccttccacataggcataatacttcaagaagaatgcaagtgttagcaccacccactccaagcaaaaaatcaacacgcataacccaccagccaacttaagtatcaccacaccatcctcctctctaacataggacttcaacttcccgaggaagtcactagttctgctgaagaccagcacagaaactgatccctgaaatattgctgttaggactgtggcaaccatgtgggccccgtaccaacggctggagtccgatgaggccgctgcacaaccggagatggcaccggcgatggtgaggatgtggaggaggatgaaaaagaagccgcaaactgaagggagcagcctcagcgaaagggtcaagaagatgcaactggaggctgcacctagtaggatgtagttacaatataggaacactttgtgtgtgtggtggtgtgaaccattgagcgactgagagttggggttgagcgaaatacccatttgatatgatgatggttttagtaattgggagatttatatttcagagaggcctc

SEQ ID NO: 356 - DNA, 705 bp, Citrus
tttccatttgtctttcataacccgccggattcatgtaactgcgcacaaagcatgtattagctgtgtaaactagtatgtggactgagaaatctttagatgtttctgaacattttccacaggatggggctgggtcattgatactgagtttttatggcagactcttggtaatggtaatatgagcctcatccaatctcctctcgagcagcctttgatgatcagcagctctgctaccgaggaccgcagggagaagctttcaagatacaggaataagaagacgaagaggaactttggaaggagaatcaagtatgcatgcaggaaggctctagctgacagtcaaccaaggattcgtggaaggtttgcgaagaccgaagaatcagatgtttccaagaggcaataactcttaagctaaatcggtaagaagaagaagcataggaatgaaatagctaggtcaaatgaagacatgtaatggaagagtttgaaagtagtgaagcctggcaaaatgttaaaagactccacgttaagcccgaagaggttatgttaaataaacaagtacccccaaatcctgcaaaatagttgatctcttattctccgtaataacctacttagtaaactgaaagggtcgagtagggttgtatatagggtttgttgaaataaaagtatagtggaagaattgtacttgttcaatatatgttatatgaaatggca

SEQ ID NO: 357 - DNA, 504 bp, Citrus
tttgcaattagcgcacacactgtggccattggcatcacaaattctcacacatcgaatcttattacatatcataagaaagatggaatactcaagcattatggcaagagtaacatgtactaaaaagaaattgatgcagactcaaaattttgagcctggaacgtgatcatcatggcagcagcaaaatgttgtgaatttctccatatagcggtggcattcaggacaagtcatgctcgctggaatcgtaccggaatgagcagagaactcataacggcaacaaggatgtgcaactccatgaatcttctttccaaaaagcttcctctctcaagctggtgaaagggaaggcattgcttccccaaatccacatcatgtggagtgaattgggggagactactcttccttgagggtcaagaactaccacgattggcttgttcttgaagtgccacacatccttgacatacctgatcacagctctgtcaatcaaagtgggatggtaaactgtgttac

SEQ ID NO: 358 - DNA, 545 bp, Citrus
gagattgtgaaatcatatccacacatcaaaggcatcaactttgatttaccacatgtcatcaccacagcaccggtctatgatggggtcacacatgtttcgggtgacatgtttcacaccattcctaatgctgacgcacttctcttgaagtgggtgctccacaattggagcgatgaggcttgtgtaaagattttgaagaattgccggaaagcaataccagaaaaaactggaaaagtgatagttattgatgttgttttacaacctgatggtcaaggcctgtttgatgacgccggttatgcatgtgatttagttatgatggttaacacggcgggcgggaaagagaggactgagcttgagtggaagaaattattggaagaaggaggcttccctcgctaccagatcatcaaaattccagctttacaatctattatcgaggcctatccagagtgaaatgaaaatttaagttgatagctaaaccatattcacaccgatgcctatataattattaataaaataggtgtgaaataaagttcagtactctatgggca

SEQ ID NO: 359 - DNA, 897 bp, Citrus
  misc_feature (797)..(797): n is a, c, g, or t
gtattcatcttttaataggaaataaattggtaaaaaagggagatcatatttttctcagattaggagaaaagaggcagagcaagggaagccagaaaacccaactggtaaatgaacatgatcccatttgatgttaccattgctcatgtctctctccataatgaatgcaccttctccttcacattcattgcatataaatgatgacaatgatgatgatgatgatgatgagcagcctctgccaccattgcctgtcatcacaaacaccttctgctgctgttgagagttatgaagtgtagtcacactaacacaaggagatgatgatccctcagttacacttttgggaagtggcacaatggagctgacaattttgccctccaccacttccccatttttctgctgttctttccccaaaaaccacaaccattgatgctgctgccgcctattggaagtgattgtggcagtgctgcccctggggcttaagcttggaaatggccaaacatgatcaaattttgaccaagacccagttgtaggatcgtaacactcagcatcaggcttgaatctcccctgagattcggtgccatatccactcacaacaaagaatctatcaccttccaagcaaaccccctgacactcatctctttcctcatccatctcaggcaacatcctccactcgtcagcttcaacgtcatagacctcagccgatttcaaagcattcttttggccatcgtgccctccggcaacacacacagttaaagctcccacaacagcacaggcaaagaaagatcttgcaactgacatangctttgcacgacgccatcgagaagaattattaaccatgtcgagaacgtacacgtcgggggaccggttctagtgttatggggtcccaaccacctatcagca

SEQ ID NO: 360 - DNA, 728 bp, Citrus
ggccttagtctccctttgtctgcactcaaagaacaagagctgcagaaacttataacgactaataaatccatcaggcatcagcgtttgttctcttctcgaaaccaaactacgacaagtccatgtcttcgacgtcgttgcagcaaccgcagcagcccggtttggtatatccaaacactgtaacagggcagccgccagcagtttcctcgtcgtcccactcaaatggatcatttgggacagttttcatagtcctggctgttattattgttatatcatcaatagcttgctgtcttggacgcctttgcaacaggcgccaccacagctctcacggtcacaaagagaagccttcaaagcaaattcgtccaagaggcaagcctggagctggaagggacctggaattcgggccagatcccgaaagaaaccccagctttcgccgcagagaaagagaaacgacggaactggagtttgggtttgataagaatattgctgcttcaaaacctgctggcaatggtgaaagcagaggcttcaagcagtttaataatggagacatcagagttgctcccaagattgttagctttggagagcccaaggaccgtgcatgattcaacaactacatgtgtaaacatgtttcaagaaaccatattctattttaattcttctcctcttttcagtttttttttttttatttgtagcggcagcagcttgaattgtgtaattataagtgtcttaac

SEQ ID NO: 361 - DNA, 823 bp, Citrus
tttttttttttaaacactgaaaattcacaacttttatttcatgatattactagtttcggttcaaaggaacaaaggctatctaaagaccgttttatttattacataagcatcaaggaggccggtccataattccattaactagctaagagttataatgcaagggcattcaagactcgcatttagctgctccttcagccgggaatataacaacaggaaacacaggctcataatccgccttgagaaccaaacgtcgagcactgtcttcaaaagaaaccccaacattctggcagagaaataggcaggaagcacaaactgaagggcaataaacaatcctgtatgtggctggatcgcttgtcccaattctctcaaatttgaaccagtttagcaaagttttagctccagggtctccttcatttccaccagttgttataaaccattttcctctctcttcgtcatagttgtcaaccttccatactagtgaatcagagcaggaatcgactatcgagaatttcacattcagatccacggcttcatagataaaacgactgctgttatacgctttgaattttaaaggctttcctgtacgtggtgcggatgttacttgggcaacatcaagtgggcaggaatcgcctctgtgccgcaaggtggttaaaccacggccgttgccactttccaaaacatagtattcttggtctgctcggacatcgtcgccattgatatcatgcaaacggcttcccacaagaggctttgcggcaaaggcaagaagaaggaaggagattgccatcacaaaaggagtcttcattttgttatctttcggagcctc

SEQ ID NO: 362 - DNA, 763 bp, Citrus
ttttttttgtaataattaaacaactagttattattcatttgaagacaaagattagcaatatcagttgtcccatacacgccattaaattaaagagggaaattgtttagaatgacacatcaaactatatttttacactttgctgaaagctggggtcgtgtagcaagaaagtgatggattagtaaagttatgaaaaaaagtatcaagctccatactttccttcttcatgagaagcagcactagaagaaacatagtatgcaacacaaaacaagccatgaacgaaacaaagaatccctccaatcgacagaaaatgatgatgtgtcaacccacaagaagctcttgatttgttgtttgacaatgttccaatcaccagcattgacattccaacggctaatatgatccaggagaaaacaaggcatgccaaggatagttgcctgttaggggaagctttagaaagctcatcttgagaacaaatgcacatgcaaccaccaagcaagttagcaataacatgagctaaagccaaaagtcctgctgcagctaaccctagcttaaaagcatcgtgacttgggtctctacactcaaatatccaaagcctcaaatgcttaaccttattttgtgcaacttcagcttggaagccaagaattccagcagcaacatccagggcaataatcaagagacaaacaagaactcctccaactttaaccattttctgagaaataatgtgataagttttcggatgtacagcaaaagataaaagaggggatga

SEQ ID NO: 363 - DNA, 642 bp, Citrus
tttttttttttttttttggaagaaaaatcctctttcattgcttctttataatcttaaaaagctaggacagtagctaaagttgaacgatgatttctttgtctatttttctccaaaaattgttcaaggatcctgtccttgcagtacaattattccttcagcatgcacagcctgccacttaccattagctacactttttgctacaaactaagaattcatccttcgagcatagctttggcagcatcaatcagtatgggtctaaaatcatttgaagcccgacccagcacagtgtagccttccttgtcttccacatcaacatccgctccatgtcttattaaaaaaagagcaacctctttgttatggcaaatcactgcattcataagaggagtttgtccggctttatcagtagcatcaacctctgctccttcttcaattaagagttcacacaatgctgaattccctgtactagctccccggtgcaatgctgtccaaccaacaagccttgtccttcgagttcatttttgcaccacgtgagatcagaagttccacaatcttcaaccatcccttgctggcagcatagtgaagagcggttcgcccaccatcattcttcaaatttacatcagctcctttgcttaacaacatttc

SEQ ID NO: 364 - DNA, 659 bp, Citrus
gctattagtgattttattttgctttaattcgggttgaataggtagtgaattaaaagataaatacaagcattcaatcctttgtttcaccaaagaaattatttatgtatgactagtccaaacaagtaacatttgaacccaacacttcacccctagatgtcagtccttcaattttgtgacctttatgtataacaaatgttgtcgaatcccatgtactccttgtgttcaatccttttgatcatttttgctaagcctacgccacctagtgagaatgcactcacaaagattgtgaaggccagagcgaaaatgattatagaagttctgcctagtattttgatcagctttttcaccacgtgctgccctacaaaggcagcaatgatcgacagggcaaagaagtagagagcgtaaggtactgggaaacgcttcaaaagatagtactctacaacggacattgatgaggaaaatgtcatggcaaagagggctgtggcactagaaacctcaggagggataccgagctccaagaaaagagggcctaaaatgaatcctccaccaagtccgagtagtccaccaaccataccagccgttataccgcaagcacaataaaacacaagctgggatgctctccatttcgtgccttcatctcccttcaatgctatctttcg

SEQ ID NO: 365 - DNA, 856 bp, Citrus
  misc_feature (27)..(29): n is a, c, g, or t
gggaacccaccattaccattatctcannnaaacccaaacaaccatgaaatccccacgtcctctaattcttctctcattcctcttttcaactttcttcctccagcttcatgcaatccccgccgcagcccctgcaagctatccacctgacaccggttccggcaccggcacggacttcatccgtacaagttgcaactcaacattgtaccccgaaatatgctactccactctatcccgctacgccagcaccatccagcaggaccccgctcagcttgccagcgtagccatcggcgtgacgctatccaaagccaagcgcatggctaattacgtgtccaacatctcccgccaagccgactacggctccgaccagcgagccgcagccgctttgcacgactgtttctccaactttggggacgcagtcgaggagatttacggctcgctcaagcagatgcgccagattaggtcggctgggacttcccgggccagctttaggtttcagatgagcaatgtgcagacgtggatgagcgccgcgctgactgacgaggaaacgtgcacggacggatttgaggatgtggctgatgggcaaatgaaggaggaggtttgtgacagggttgagtatgtgaagaagttgacgagcaatgcacttgctcttgtcaatcgttatgctgagaatgggatgaactgaatcgtcatgatgatgactggttttgggccgttggatttggtggcgggttagatagaacttagttcgtgattttgtgatatatatatatatatattaagagtgagttagtttcgtgtttattgtatatgttgttctgttaacattttattttcatttttaatttttttctattaa

SEQ ID NO: 366 - DNA, 807 bp, Citrus
ggggaagcaagcagaaagcttttaattagtttctgaaaacatggcaaaaacaggctgtcttttgctattgctctctctcctctacattataagcttggtcacagctgccgggattgctgacacaagatttatcagaagttcttgcaaatccacaacttatccagcgctgtgcgtgcagtctctctcagcttatgccccatcaattcaacaaagcccccggcaactggctgtcacagccttgtccgtgagcctctccagggcccaatccgcaaagtcattcgtgaccaagctgaggaagttcaggaacctgaagcacagagagtatgaggcgattgccgactgcttggatgagatgggtgacactgtggaccggctcagcaagtcggttcaggagctgaaccacatgggtcaggccaagggtcaggactttctgtggcacatgagcaacgttgagacatgggttagtgctgctttgactgatgagaacacttgtactgatgggttcggtggcaaggccttggagggtaaggttaagtcctctgttagggctcaggttgttaatgttgctcatgtcactagcaatgccctttcactgatcaataagtttgctgggaaacactgagccgtagttaaccatatggctgtgtgaatgttttgcgagagtttgtgtctctttttatctttggtttagttttaatgtacaaattaatcatcagttataagtgagtgttaattttgagcatatctataaaaatgagcttatgtgaatgagcaaagattcttgtcttttatggaaaaagttttatt

SEQ ID NO: 367 - DNA, 506 bp, Citrus
cccctctccatctcccccatcaaagataattcgatctcaaactcaagctattgcaccgccgcggcgtggagacgagaaatggagaaagcaatgcgtggcgggaatggcggccgcgtgcatggcattcggaggagttgctatacaaatgggcgagagcgatggcagtgcgatggcaaaggagatgacgacgacgacgacccctactgcagagccgaaagcgaggtggagtgaaaagagagagtgcccgccgtggcacctcaattcgttggagaccattgtgcccgagaatctgccgaggccatcggctccgaggagatgggaggctgtcggtaacaggtatcttactaaggacgccccgccagtcaaagtgacggttacaagaggcagaaacaattgcttttccatgtaaataattcgaaaatatgtgtgttcttattagtttcttacttcacttgtacttgtctgcatataataattaatatgatggccaaaaaaaatatccataa

SEQ ID NO: 368 - DNA, 630 bp, Citrus
gagggcaacgcagaaacatagttttataacaatattagtacatagatataatgctaaatttattttaaaaatgtggatgatgcattaaaattattttttaagtccattagtaaacagagaagcgaaaacctccatttcttgtttctccaaaacaacaccaatctcaacgcctccgcctccatctttactctccgcaaaagagacggcgcctgtcctgtctattgacacgatctccaccttcctcggcctcccccacccgaaatctgacccgtaaacatcaaaacgggtggacccggcgacggaaagcataaatgctccttgtttcgcatgttctactatttttgcaatcttcacatctgatccttcatcagcaacattcgcatctatccgttggatcaaatcgcttatcatttccgcagcaaaagcaaccccattttcttgctttacttcactagcttctgtaactgcaccatgtatcccattacaattaccgaagtaattatccggaaccggaggatccaagcgggtcctgtaatccgcagtgaacccaacaagagcatttctattaccttgagctttacccgttttggctttacacatgcaaacaaatacataagctaatgtaagtac

SEQ ID NO: 369 - DNA, 607 bp, Citrus
taggtcacgtagaaaatattaaaatacggaacaaagaaaataagaacaagcgtgttgaacttaatcacacaaacacaccgagctggaagcaaatcgcatagctagcttaatacaacttatagccaaataatgaattaaaacggctagctaaaccatacgatcaacaatggtccaagtcaaatcattctcgaaaatccagtgacaaacttcgatccgccctggacccgaacccaaagccaagaatgctccatgagtctggctccaagcagacgtatcgatgtgacagatggcaacaccgtgattgattttagccttggttttgggatccaataaatcagcttcatacaccctcacttttggaaccgagtggcagtagtatagcaaatatggaaacaagctttggtgacaagagacagattgggtgactttgccaccgttgattcccttcactgaaccaatcataatgttctgttttgacccttgcacgttctgagttgtacgaagagtcacgctgtttcccagtactgaggtggcgaagtcaatcatatcctcggctgagtcaatgcaccgtttggtctcgcccttgcttggtggccgctcacactcg

SEQ ID NO: 370 - DNA, 848 bp, Citrus
ctcctgttgattctggcttctggtggatcatattacttcgggcctacacaaagtcaacgggagacagttcgttggctgagttgcccgaatgccagaagggtatgcggctaattctgagtttatgtctctcggaaggttttgacacattccctactcttctatgtgctgatggatgctgcatgattgatcgaagaatgggtgtttatggatacccaattgagatacaggccctgttcttcatggctttaaggtgtgctttggttttactcaagcaagatgacgagggaaaggaatttgttgaaagaatagttaaacgtcttcatgccttaaactatcacatgagaagttatttttggctagatttgaagcagcttaatgatatatatcgatataaaacagaggagtattctcacaccgcagtcaacaaatttaatgtaattccagattcacttccagaatgggtttttgatttcatgccaattagaggtggctactttattggtaatgttagccctgctaaaatggatttccgctggtttgccttgggcaattgcattgctattctttcatcattggccactgaagaacagtcaaatgcaattatggatcttatagaatcacgctgggaggagttggttggagaaatgcctataaaggtttgctatccagcgatagaaagccatgactggagaatcattacaggatgtgacccaaaaaataccaggtggagttaccacaatgggggatcttggccagtacttctgtggcttctcactgctgcatgtataaagaccgggcgccctcaaattgctagacgggccattgaacttgctgaaagcaggttgctg

SEQ ID NO: 371 - DNA, 841 bp, Citrus
ggggaatcaaattatcagtttctttttctccctacttcatcattttccaatagtttcccactaaagattaccatgggcactgaagttgtaatggtggatgaaatcccatttcctcctcagatcaccaccaccaagccgttgaaccttctgggtcatggtttaacagacattgagatacactttctccaaatcaagttcacggcaattggagtctacttggatcctgaaattttgagtcacttgcaacagtggaagggcaaacagggaagttcccttgcacaagatgatgacttctttgatgctcttgtctctgctccagtagagaaattttttagaattgttgtgatcaaggagatcaaggggtcacaatggggttcagttagaaagtgcggtgagggacagattggccgaagctgacaaatatgaagaagaggaagaatctgcccttgagaaaatcgttgaattcttccaatccaagtattttaagaaggactctgtgattgcttatcattttccggcaacatcccctactgctgagatagtgtttacaagtgaaggaaaggaggactcaaaaatcaaagtggagaatgcgaatgtggttgagatgatcaagaaatggtacttgggtggagcaaggggagtgtctcctacaacaacatcatctctagccaatactctctcagctgagttatcaaaatgaagcagctctgcgctttctaataaaagtgcttcttcacttgggttttggaattgctgtaaatttgtggaatttgaatgacgtgtttaccccgcaaccatgcttctattttaatgaacatttgctttgctaaggtcctaaaaa

SEQ ID NO: 372 - DNA, 916 bp, Citrus
caaatgtacatacatatgatttaagtttttggaatctaaaaaccagaaagcatcaagcaagcatgctcatgcttggacctcactcaaatgtctggactttacaaatttaatatggcttgaatctgaaaggccaaatcacacccaatcaagaatcaaaaaccaactgtaaaatggcggggaaaaaaaagatacaacatcctatctatgacaaacaacaataaatcagtgcctaacagtgacagatatttcacataaaacatgaaagaaattcagaagactgtgactacggtatggaaaatgattgatgaagagagaaaattttaaatgtcgaaagtgaaagttcattttattgaattaaatggtattgaattaagtgggcacccttccactacttgctaaggataaatgagacgatcttcaatttcaccgctaacatgaatgtctgctgttgtgatgtgctttggttgaatttgagatgtatgcttttcatttctgtcttgcctcaatgcgctatcagctcatctgctccccaatcaaatcaagccccacaaggaggaaggtcacaccttgaaagagcaagaagtagaagtgcactccctgggctgctaacaagcttctgacggaagctgtaagtaggaggaatgcgagcgtcagttctttcctgtatatcttgttgacctttttcttagctgcgggagctgattctttctgttcctttaactgggttaactcagaaagctcactctcggaagctcctctgagtatctgtggctggttcattgtcttagattctctctcaacagctgctagcaagtcagattctgatgatctgccagccttcttggtgacaacccactcataagagctacccaactggaatagtccagataccattgcattgaatttggtcactgac

SEQ ID NO: 373 - DNA, 706 bp, Citrus
ggaggcccaaatcttggttgataccacatggaacttactacttttgaataattaaaagcactttagaaaaaccagccaatttttaaagcatttttcacactatatatgaagcttcttactggttgtggctgcaagacttcttgtgtagataggctgattcagctattgtgcatcttctccctccctccctcctccagtccttctcccctcttcaatgggaaagaagatgtcaattgttttgctaaggataatgcttgctctgcttgccacatctataattactccaaaatcaaatggggagaatgagcagtggtgcatagctgatgagcagacgccagatgatgagttgcaagctgcaatggattgggcttgtgggaatggtgcagattgtagcaagattcaaatgaaccagccttgctattatcccaacacgacaagagaccatgcttcatatgctttcaacagctattttcagaagttcaagaacaaaggcggatcttgctactttaaaggagctgccgtgattactgaacttgatcccagtcacaactcttgccgatatgagttcataccttaactcatcagcaaccatcaagatttgcatcgacgaactcggaagatgaaaattctcatttctcatttaagttgctccggttttgcattttaataagtattattcagaagaaatgacgaatacaaagtcagg

SEQ ID NO: 374 - DNA, 816 bp, Citrus
  misc_feature (15)..(15): n is a, c, g, or t
tttttttttttctgnaatggggaatttatcataaaatagactaataaaagtatttaatatttatcatcaggactcttgatcccttaaactggcatcctagcaaacgacaccttattacatcacatccccattcttgcatatttctcacactggtcacagagcatggcacagtcttcattacatcacacagaagggggaatataacaatgaggaatcagttccatgctctctttatatcatcactcaatcactcccatagaatcatttatttttgcgatattatagcataattagtgactagtatggcctaaaataattgaaacgcaaaagcagaacttttaattttcttgctcgcaacttgcaatggttctctctagctgtgatggccattgcttttgtctttgacggggaatccattaccagaaggctttcttgaaagagaaagatgcacaccaggatcatgatgagagcatgaagaatggaatacaagcgagttgttaacaccttgcacgttactattcatgaatgcacccattagaggaggaggcattgccgcctttgctttgtaattcttgtctttcttggacttctcttcatcactgctgctgctaaagctgtgcaatccggtgtcatcgctctgagttttaaggcttcccttgttgtggagagtatgaggggtgccatcaaaagtatgtttcaggggagacctgatcacttccatgaaagcacctttgttctcccctgcaattgttataaccctcatgccaacctcatcggaatctgaagagaactgcttgcggggaaactttcccattt

SEQ ID NO: 375 - DNA, 726 bp, Citrus
ttttggaatcattgtttcatggaaaataaagctagttgctgttccgccaactgtgactgtatttgccgtcccaagaaccttggaacaaaatgcaacaagactacttcacaaatggcagtacattgcagacagggtccatgaagatttgttcatctcacccttcttatacagagagaattccactatggtctgtttattcacatcgttgtttctaggtggggttgataggctacttccattgatgcagcagagcttccctgagctcggattaactaaagaagactgcagagaaatgagcttcattgaatccgtcgtttaccttgacggattcaagattagagagtcaattaatgcagatgtattgattaatgagagatttgtcaaaaggtttttcataggaaaagcagactttgtaacagtgccgattcctgtggaagctcttgaaggggcatatgatttattttatgaggaggatccacgaacctacggccttctcgtgttttttccttacggtggaaaaatgagtgagatttcagagtccgaaattccattcccacatagagcaggcaacatatacacacttttgtactatgcggaatggcaagatgcaactgatgaagcgtatcaaaggcacttaaatatggtcagaaagctgttcaattatatgactccttatgttacaaaaatcctcgagcagcatatattaatacagggatcttgacattg

SEQ ID NO: 376 - DNA, 1533 bp, Citrus
  misc_feature (1110)..(1110): n is a, c, g, or t
  misc_feature (1276)..(1276): n is a, c, g, or t
atggctcttcgaattcttataactgtctcacttgtgctcttttctctctctcatacctcttttgggtacagcccagaagaagtaaaatcgtggtgtggcaaaacgccaaaccctcaaccatgcgagtattttttgacacaaaaaactgatgtcacttccatcaaacaagacactgacttttacaaaatttcattacagcttgcactagaacgtgccacgacagcccaatcacgcacgtatacccttggctcaaagtgccgaaacgagcgtgaaaaggctgcatgggaagattgccgcgagctttatgaactaacagttcttaagctcaaccaaacctccaactctagccctggatgcaccaaagttgacaaacaaacatggcttagctcggctcttacaaacttagagacgtgccgagccagcttagaggatcttggggttcccgaatatgtgttacctttattgtcaaataatgtaacaaagttgatcagtaacgctctgtccctcaacaaggtgccatataatgagcctagttacaaagatggcttcccaacgtgggtcaagcccggcgaccgaaagctgttgcagacgactccacgagcaaatattgtggtggcccaggatggttccgggaatgttaaaacgatacaggaggcagtagcggcggcatcgcgggcaggtggcagcaggtatgtgatttatatcaaggcaggaacatataatgagaacattgaagtgaagttgaagaatattatgttcgtgggagatgggattggcaagactattatcactgggagcaaaagtgttggaggtggcgctacaaccttcaaatcagctactgttgctgttgttggagataacttcattgctcgtgacataacaatccgcaacactgctggtccaaacaatcaccaggcggtggcactgcgttccgggtcggatctctcagttttctacagatgcagctttgaaggataccaggacaccctctacgttcattcacagcgtcaattctacagagagtgtgacatttatgggacagtggatttcatatttggtaacgctgcggttgtgttacaaaactgcaacatatttgcacgcaamcccccnaacaggaccaacactctcaccgcacaaggcagaaccgaccctaaccagaacactggaatcattattcacaactgtagggtcactgctgcttccgacttgaagcctgttcaaagctccgttaagacattccttgggagaccctggaagcagtactcgcgaaccgttnacatcaagaccttccttgacagcttgataaaccccgctggatggatggaatggagtggtgattttgctttgaatactctgtattatgctgagtatatgaacactggcccgggttcttcaactgctaacagagtcaagtggcgtggctatcacgttcttaccagtccgtcccaggttagccagttcaccgtaggcaactttattgctggaaattcttggttgccggccaccaacgtccccttcacctccggtctctag

SEQ ID NO: 377 - DNA, 567 bp, Citrus
caacaatttgggatgcctcaaattgggccacatcaggtggcaaagccaaagttaattacaagtacgcaccattcacttccgaatttaaagaccttttgttagagggctgcccggttgatcccattgaacaagttccctcctccaattgccaagacactgattcccggctggccgagaaaggcctctctgtcatcactccaccccggagacgggccatgcgtagattccgggaacgttacatgtactattcatattgttatgacacaatacgataccccgtgccattacccgaatgtgttcttgttccatcagaacgacaacgttttaaagacaccggtaggttgaaattcggcggcagccataagagtcatagacataggtcgaggcggcagccgggagcttcaaattccgaggatccggacatgtaaattaatttattgtggtggtgttttcatgcttatgattatttttttgttttttttattttaacgtatagcttgttttgtgattagaaaatatatatatagaggaaatgaataatattttgggaaaaaaaaaaaaaaaaaa

SEQ ID NO: 378 - DNA, 590 bp, Citrus
tttttttttttttttttatctttgttgtatttaagcttcatttccggagacttaagctgaactatcgaaactagggttagggtttgtcattttttgtaatttacgtggttttgcgagttgtgggtgttagattataactgggtttgtgagtgtttttggtgaaatgggaagttgtttgattggttgatttatttggggaaatttagaatctgatgagacgccgggtggcggcgagtggcccgacagagcaaatggataagggagccgggaagaatcatcaaaataggctatgttttttagttacattgtctgctttcttttggattctgttgttgtactttcattttattgtgctcgggactaataatgttagtgaatctaaccaattggaaaccagtatcaaaaactcagaatcttcttttgtccatttaactaatgatgatcatctagcagaacctcggaaggaagccacccagcctagcacttttcgtgaatctactgattcacaattcaaaccagttaatccagaacccactaaccctgaaccagtcgttcatgaatctccccaatcacaatccaaacccattaac

SEQ ID NO: 379 - DNA, 608 bp, Citrus
tttttttttttttttttactagatcaagtatatattaggctatgcggtagaaataagtaacaacaattctcaaaagaaaaattggagctcggggactttatttatgcatcataaatacctacggagattcaccccccgacctggcacctcgagcggggtaaagagaaaataacgtaccccagcgagtattatcatttatgccatactgcatacttatgacctgaggttgctagtgtccattctttgccagccgggcaccatgaaccatccccaattttcatgcagactttgtccccaattattgcagagtaaagatttgattgggcctccaaaattttgatagatgatcggctatgaatgtcttgctgccttcgaacatccatcagtttaacaatttggttatgaatagagtcaccccaatcatagaagtgatcatagaatactgatggtatgcctggatgcatgagtatgtatgcgtaaccctccataatatgatttgaggggaatggccaatgggcctgtgttgagcctgtgtcatggttgtcaaggaatgtgacagcccttgaaggccaccatcccattacacctggaggcttcccttgagcatc

SEQ ID NO: 380 - DNA, 704 bp, Citrus
  misc_feature (6)..(6): n is a, c, g, or t
cccccngggctgcaggtttttttttaaatctgtagatggaatctcgaattttcctccttggttcttttgacatgaactcactaggagaacacgtttaaccaggcaaaaatcaatttacatttgctgatacagataaaataatcagcaatcctagcttatgtttttaaatgaaaatacaagaatttaggtatatagtttcaactattgagcatgttgtgaaatgcaccaaactcagaaccctttgacttgcgtgtgctggtttggcaattaaaatatatgactgccctgagacatgctcaatcactagcttaagaacaaccattgccacagcaagattattaaaatcaaggaacaatctcgagctcgaatatccttaaaagacagatgtgatgaaccagcagatgaagacttcagtccatgaaatccaatgtcatatgcaatgctcccatcaggcttaaacagtccaaaattcctctcagaagtcggtccaggtttctgattctcattaaaaatagcaaaaacataagccttcaccacatttttcggccgaagaggagttcctttcttcttagcaagccttttccgcagattataattgtatgtccttgcattgtcaaccgttgcagcagcttcattgctatctccacgggaggcccatcctgtctctgtgactatgacttccatctttttaaatccagcatcct

SEQ ID NO: 381 - DNA, 505 bp, Citrus
tttttttttttttttttcataaaagctaaggtaatattatgctccgcattgcagtgtaacactacattgcatgtaatacacaaaacaatagaatacatcacgttacaggttaatacaaatgttaaaacgtttgtattaacattttattataacattacatttcaactacaacatagtatctgctgatcccctataatgaagcgtatggtattacccaaaatcaaatgtaacattacatgcctatggacaaaaatgttgtaatttcgacccggtagtcttcatacagagcaaagcatccagtgcacaatttccaactgaatttacatgttctggaaaattgcaactttattcctctctccttttgtacctttatttcacttgcttccaaataaatactcactcccctttcctcctttctaggcttgacctctataatttctttttaatttttttcattgatataatgcttttatcaatagcttcccaatcaggaaaaaataaaaaa

SEQ ID NO: 382 - DNA, 560 bp, Citrus
atccaataatcaataatccaaaaaaatataatatagctcaagaagtagtcatctagaagaaactagaaaaaaaggaaataaagaaaaatacataaatggtataaatctaaatctataatagcataaatgttaagatcacaatgaatgctaaaccccagagtgaggggcttgaagaataagaggaagactgaggagaatagctaggatctaattggatgataaaactgcattgcccttgtgaaagattctgtgtggtaaccttgcccaaaccttgaaagccacaggccaactcatcctgattctttatctgatagtacatattaaatgcgtatgaagcattcccgttagcatccaagttattacaagaagagccatatccaagtgctgtgcaatctgaccaggtgcaagcatactttatgttatcaacaagtttgctcatatccttggcatccggattaagcatacaccattggcttggcatatacttcacaccacttgcacctataagcattttgttttgaccctgacctgaaagatccattgtgaatttaggctgtccg

SEQ ID NO: 383 - DNA, 468 bp, Citrus
tgtactttactttgtcatgtcaactagtccggtgaggcagccaagcccaaataatagaatacacatgaagtaaaaaataatacaaggtacaataagcactacaccatgcctaccaaaagaaaaaataaaaaaccatcaggcaaagacaacatcgaggcccaattttaaacccaatggcggaagctatgcctatacataacgatccacttacaggttttaaattagaaaaagaagttgaataaaagctacgacaataatctctataacggtgcacaatcccgttgagattcccgccaccgacttttccaattttagagcttttccttccacatgggtataatcacatgcctcgtaacttgggtcggctgaagtgaggactcctgttttgttgaaatcacaagcatagtcatgaagcccgttggcctgatagaaggcgttcatggcgtatgctgcgtgtgaccgcacatt

SEQ ID NO: 384 - DNA, 925 bp, Citrus
ttttttttttactggttaaaatgcacacttcagaattccactataaagaatacaaccgaattcatcctaacaaggtagttacaataacgattcctgaagaaatcctttgttctgtttgtacaaaatcgaatgaacttatcatagaaattagcctgccatatgttcaattaactttgacaccccacatctcttcgggaggaccaaaattgggtgtactcagtgttttctgacagaaacgagaatggatatttctcaaagatcccactgccggaacaaattccaagaaagacaaatctttctacaaaaaaactgcagtcatgagtgcaacgctgaaaatcacagagcttgtgacaagatcaccaccgtagacatattttggagagcagccagaagttgtagtatttgaggaaggagccagtgatgttccatttgtaatggtgccatttcttccatggcttcctggaaatatacaagaaccatgacttgggtcagtggtagtaattgtagcaacccccttgaaatcacaggtcccaggagctttagccatctgttgataatatgcattgaaagcatatgttgaatgtgaaatcacattatctggctcataacatggctgaccctgcagcaaggctgagcaatcaacttttcctggaccacaagcccaatccagagcagcctgtagcatctttttatcagcaccatccttggcaacacagaaggtttgatttgtcgtatcattcgccaaaacagttccagccccggtcaagtgtaaggtataaaccggtactccattggcattaaatagcccccagttcttttcagagacagaccctggtctcagatcctcattgtaaagctcataaatataagtactaactgcaatccctgggtgtttaggagttcctgtgttgctaagcacgtgtct

SEQ ID NO: 385 - DNA, 806 bp, Citrus
tttttttttttttttttcctaggataacaaaagtttttattgatcaagattttgtagcacattgatcaatcttccaaaattcagcatctttaagagaaaatttcaggaaatattggatcaagaaacagcagcagcagcagcagaagagcgcaacagacacccttcagcaaaagcctgaccacatctagaccaaaacataagctaccgagctaccaatttttcgttcatcagatatgcttttattgaattcgacatgaaaatcacactcaataaaacgtccgcataggtattcaattattcatacatgataaatagagtttcaagtcttcatacaacgagcactactattatctatccagttacttgacatacttggcaaaccactccagcaagttttgatgggcttcctctgcagccttcacagcagattcatcttctacattatatctcactgtccatccatgagccactttaggaaatattttcacaaagctatcaacctcagatatggcatttaaggcctcttcaaattccttcacgagagctggtggagacaagcgatcaatttcggctcctagaattgaaaggggaacctcaacccccttgatatcatctacagtgacaaaagagggatgtaacagcacagcagcttggatgaactcacgttttcctagttgaacaaccactttagcgccccagcagaagcccgcagccccaattgcagttatacctttactcttaagagcttgaataactggctttgcctcttcaaatcccttatccacaccatgatcttttatccattc

SEQ ID NO: 386 - DNA, 823 bp, Citrus
ctcaaatcatggctgctactgttactaaactctctcaattcctcctcttcctcttcctctccctgtcttgcaacgccatcaccccctccgccgctgactccatcggagtcaactacggcgccatcgccaacaacctcccgccacctcagcaagtagccaatttcctcaaaacccaaaccaccatagaccgcgtcaagctcttcgacgccaaccccgaattcctccgcgccttcgcccacacaaacatccccgtcaccgtcacagtcggcaacggcgacatacctgccctcgcaaaactccccgccgcccagtcctgggtcgctaacaacatcctgccgcatcacccccagaccatcttcagatacatcgtcctcggcaacgaaatcttggccacgtcggataaagtcctcatcgcttctctcctgcccgccatgagaactcttaaatcagctctcgatgctgccaatctgagcagcgtccaggtgtcgacacctcattccctggggattttatcaacctctgagccgccgagtaccggaaggttccgtaaaggttacgataggcttatctttgctaggattctcgagttccacagacagactaaatccccgtttatggttaacccctacccgtattttgggttcaagcctcagacgctcaactacgccttgtttaaaccaaacgccggcgtttttgatcctgccacggggaagaattacaccaacatgtttgacgcccagcttgatgcggtatactcggctatgaagaaagttgggtacgaagacgtcgacattgtggttggggaaactgggtggccgtcggc

SEQ ID NO: 387 - DNA, 882 bp, Citrus
tttttttttttttttttctgatccaaaccgtatgaggcagccaagcccaaataatagaatacacatgaagtaaaaaataatacaaggtacaattaagcactacaccatgcctaccaaaagaaaaaataaaaaaccatcaggcaaagacaacatcaaggcccaattttaaacccaatggcggaagctatgcctgtacataacgatcctcttacaggttttaaattagaaaaagaagttgaataaaagctacgacaataatctctataacggtgcacaatcccgttgagattcccgccaccgacttttccaattttagagcttttccttccacatgggtataatcacatgcctcgtaacttgggtcggctgaagtgaggactcctgttttgttgaaatcacaagcatagtcatgaagcccgttggcctgatagaaggcgttcatggcgtatgctgcgtgtgaccgcacattgttcggattgaagcagggcccaccggcttgtataggcttgcaatccacgccagtgccgcacacgtagtctatgtttgcctgcagcgctgcatccgaggcgtctgattttggcacgcaccatttcctgcccgtgaccgcgcctgatggcggttttgcaactggagcttcggtgggaggtcttccacctggtgctttcgcgggaccctgtgcctgtttattacgcaaaatgcccacatcataaaccggcgtaaaatcgggtttaaacaacccgaaattctgctccgatatggatggtttcagattctcgttgaataaggcgaaaatgtacacctcaaaagtcctgttaggcatcagaggcgttccttttcccagagtcacgtgcttcacgagattcccattatacgacagcgcat

SEQ ID NO: 388 - DNA, 840 bp, Citrus
ttttgcaaacttctaagaggttctgcattctgcagggagtccctggggaaatctctttgcatcagcgcaataattgtaaatcatgtaattcttctgcacccatttcagcctttcttgacttgttgaatcaagctcttgtgagaaccaggcactgctgctggatggagaggaaggtgaacttgaagcgcaagaagattttccattagaccagacacaggcatcagcgttgaagtttctgtaggaagccgtgaagggagcatgcgtccaatctgtcttgacaaggccacctcttgtagcccagtcatcagcattccagagagatgagtatattctcattggctgattctttgggaatgcaactccaattgactctgagttcttgaactctcttatgggagtaccatccacagagaagctgaaaattaagtaaacattgataagtctaagcagattgaatgacaaggaaagaagaaatgatggagattgaaggaaaatattgcttacacaatgcgctgaggattccagaggatagaataggtgtgaaagtcagcagtggggtcaaaccagaggtgaaattgttgttctttgtcacctttgccatttgtgaatatattggtatgcagagtgtaagggtcaccacttaaattccccaagaactcgaagtctatctcatcccatgttgatcctggcgattttaactgcgtgaacaaaaaatcaaaggtctatatgtcagatacatgatgatcaaacatgcatattgtttattcatataaagggtgatgatcaaacatgcatattgtttattcatataaaggcaggaacttacataataagcacctc

SEQ ID NO: 389 - DNA, 904 bp, Citrus
gtcaggtcctcagtgctgtgcaaatccaccgacattgaatccaaacagtggagcaggtcatgttgagaaacttggtggactcaacgcttatgtcactggctctcctgattccaagcttgccgttcttctcatttccgacgtttatggttatgaagctccaaacttgaggaagcttgcagacaaggttgcagcagctggattctacgtggcagttcctgacttctttcatgggggcccatatgtagctgatggtgggagacctatacaagaatggataaaagatcatggtgtggataagggatttgaagaggcaaagctagttgttcaagctcttaagagtaaaggtataactgcaattggggctgcgggcttctgctggggtgctaaagtggttgttcaactagcaaaacgtgagttcatccaagctgctgtgctgttacatccctcttttgtcactgtagatgatatcaagggggttgaggttcccctttcaattctgggagccgaaattgatcacttgtctccaccagctctcgtgaaggaatttgaagaggccttgaatgccaaatctgaggcatcttcagtttcgaagcaatgttatatcattctgttgcacttgccttcttctgtttttgtttccacacatagcgaataaaaattcatccggaatgaatgagacatcaggttgatcgctttgtgaaaatatttcctaaagtggctcacggatggacagtgagatataatgtagaagatgaatctgctgtgaaggctgcagaggaagcccatcaaaacttgctggagtggtttgccaagtatgtcaagtaactggatagataatagtagtgctcgttgtatgaagacttgaaactctatttatcatgtatgaataattgaatacctatgc

SEQ ID NO: 390 - DNA, 928 bp, Citrus
ttagtataaatgctatcaatgaactctacctttggaaaaatgtaggaaagttaaaaacacataaaagcctaaagcttcccaactaaacaactctaagaatgtgattaattacaacagtaaaggcaagttgaagctgaagatgaagcaccaatgagaactaactgctcttccttctccccgctgagagtatacagcagccacgacttagccttgcgcacaaaaacatccacaaaatatacaactctacctttacaggtatctgcaacatgccagctaaatatcttgaattacatgtcgcccttagcttttttccccgtaacaatctggaatattcggaggcctctgctgaatgcttcattgaacagtatccttgtttgcatagactggaatccaggcatccaagataagaatgccacaggggtcaagacaatcaccccaaacattatatcatacaatctagccacagagaccacgggctgccaaagcctagtggactgcaaaaagggccggaatacttgggcaatcaatatcagaccccaccctgtagggataaaagccatcagactagttaaaagatccatcaatctgaattttgtgaactccagaagggcaactatcacaagtatcataaaaataacaatgaggaactgaaccagacggtagtagatgtgttctctggctgcatatttgtcccgagcatatgatacaattgcataaatcccaaaagccataacaacatagatccaagaaagcaagtaaacgacaatactagtacttccagctgaaatacctagctggtatactatcccatactgaaaaatgaagaagcggaggtctagaattatttccattatcttccccaaaatgccagttgtctttagatgatcctgctcctcataccaccatttttcccagctctgttcagctt

SEQ ID NO: 391 - DNA, 654 bp, Citrus
tttttttttttttttttccccttccaaaccaaatttgctttatatgaaaaagaaaaaaaaaaaaaaaccattccgtgatgaataacaagacaacaaagacaacaaatcccttcaaatccttggaggctcgaacgctcaactactccttgctctttttccttttgcaagggaatcccatctcaagacccccatttacaaaacacacctttgattttcaattgtatgcatataaaaataacacaccctcccacatgatcaaaaaagcaaagcaaacccaaacccttaaccctaattattaccactcgggtatttcggaatggtctcttttgggatcatagcaatagttataaaccaggtagttcctctgaacccattgcattgcggcaacttgctgctggctcaggaccccgaacccgaacggcaaggccgggggtgggtggcacccgaatggcccgtcggcggtgcaaccagctattttgaaattcctgtactgaccaacaaaaggttggtacttataatcggctttgtatctgccctcctcgggggcccatgatgatgcatcccatattgaaccgaacaaatacatcggtcttaaggaaaatggggcatccctctttctgggataccttctaattggcacatcatccacaaaaa

SEQ ID NO: 392 - DNA, 311 bp, Citrus
tgcaaccagtaatcaaaagaagatgatggaattgatactattaacaagtctgcttttaaatattgcaagctcgcaggctcaggctcaggctccctgctatcgagagccgccaacgttctgtccgacctgtggagctgggacggtcacagaacttggtggcctcaaggcttatgtcaccggacctcctcattccaagaaagctgttctcatgatctctgatatttatggagatgaaccgccgatttacaggagcgttgcagacaaagttgcaggtgccggattcttggtcgtggctcctgatttctttcatg

SEQ ID NO: 393 - DNA, 770 bp, Citrus
cttgaggaagcttgcagacaaggttgcagcagctggattctatgtggcagttcctgacttctttcatggggatccaaatgtagatggtgggagacccctacaggaatggataaaagatcatggagtggacaagggatttgaagaggcaaagccagttattcaagctctgaagtgcaaaggaataactgcaactggggctgtgggcttctgctggggtgctaaagtagtggttcaactagcaaagcacgagttcatccaagctgccgtgctgttacatccctcttttgtcactgtagatgatatcaagggggttgaggttcccatttcagtattgggagcagaaattgatcagttttctccgccagccctggtgaaggagtttgaagaggccttaactgccaaatctgaggttgatagctttgtgaaaatatttcctaaagttgctcatggatggtctgtgagatacaatgcagaggatgaatttgctgtgaaggctgcagaggaagcgcatcaaaacttgctggaatggttaaccaagtatgtcaagtaactggaagaataaaatagtactgctcgacgcatgaagacttgaaactctatttatcatgtgtgaatgattgaataactatctggactctttattgagcgtgatgttcatttagaatttcataatagcatatctgaggacagaaaaattggtaccttatgtttcggcctggatgtggtcagtcttctgctgaagccttgctgctaatcaattttgtttgaaa

SEQ ID NO: 394 - DNA, 397 bp, Citrus
tttttttttttttttttaaataattgagttattggttcattacttgatataaataaatacagaagttattggttcattatttgccttctttgttattcatttcctctccgatggggagaagaatacgaaattaataacaaaataaagggggaaaaaaaaagaagtgatctataatctgtttagttatttgcactctggtggcatgactttaaatcttgttgtatccttacagtaagagtagaacatgagctttcttctagaccaatccaatgcagcgacttgctgctttgaaagtatggtaaattgttgtccatcaactggatccaagcttgaagcacttcccttcgagcacgaagcaggagcagaggcagaatttgataacacacagccagccctc

SEQ ID NO: 395 - DNA, 728 bp, Citrus
ggttgattttaacggacttgactccaatgaagtaatcagttgaaggtcggggcctgaaaagaagagttgctgtggacacaggattgaggataagtggggtgtatatgagggacgtggaaacgtcaacaccagggagcatcacataaggcccgtcgccaaagaagacagcaccgctagctttggtagaagagctcaagcaaatggcaaattttctaggaatgctgaaagcagaagagaacagagatggaagcgaaattgagtttcttccaaggccagccatgcccctaacaccgttagggagatctgtcaaatgaaacctatcggcacacacaaagaggagcttaggcacggaaacaactctacccgggttcttcccgttagtagactggatagacgcgacatccatggacaacggaccattgaaactaatgccatttatagtgttatccggtaagagattgcaagtattgttgttgcagcctggcctaggttgagaatcagagcaatcccaacaaaatggagcattagcaagagagcatggagcggagtggcaagggggagatgtgaaggaagatgactcataatcttctaaacaaaccacccagagaaactgaccgccgagatcaagggtatatttcacaggcacaagtggggttctttggttgatttgagtgaggtatgggagagttgatgcatctttggttaccggaagaattaatgcttttggt

SEQ ID NO: 396 - DNA, 486 bp, Citrus
tttttttttttttttttaagggaataaaattaaataaatatccaaaaaccaatcaaatacaaaaacagggacaaaataattaattcacatttttatactcatgatcccaaaatttaaaatgaaaaaaaggaaattaaaaaaaaaataaaaaaagatgaatcccctttccccagggcccagggggggggcatcagtcaatcccatggactcagggaacacccgacgggcacggttggaaatctttcggtatccttgcaaaaatcaaaaaaaacaaggtttctcagtacccaagcatggtccagtttctgaaaatcaaaaaaatgccaggcatcgtattgatcccaccaattcttaggggttgttgatacccattcaggggagggatcttcccattggcatccatcaacactgaaatccttgtaaaaagaaacaaacggagccttcttccagtcagtcttttccaggccccctcgcgttgcccctcgg

SEQ ID NO: 397 - DNA, 636 bp, Citrus
tttttttttttttttttaaaatatatattattataaataataaagagctgctgaagaaaaaatatatagattaattaaaagtttctataaattacagttttaatcaatcatcggaatatccagcacatcaggcaaatctgttccataccaagtggtacagtacagacagacgccaacactcatgtaggcagaacttccatctctcttcctctgttccaccacagtttaagcctccaaacaaaatgattataaagacagattccacagagtttgcgactaaggctgattgtccttgaccaaaacaaagaaaagctttattgaattaaaaagaaataacacaacgccccaaattattgatcttgaaacaaagcattatataaaaaaaaaaaaatgaaacgatggaaggcaaattaaaaattctctaagcatgagatgaaaagttgaaattggaacaagttgttcggtggaagagaagagaagagctgaagcctagccgtgatgtggccaaatcaaactgtaaaagattatcttccaattgatgcccacctaccacaatcgaagtcctggggtttactccaccatcaacaaaccctaggcaaagcacatcgtctttgacttgcaccattgagtttgcgc

SEQ ID NO: 398 - DNA, 589 bp, Citrus
ttttttcattcatcatatcacgcatatatttattcaattttaattgcaagaatatcaaacacgctaaatgctgacatagtcacatagttattcaatcattcataagatacaataactatcaactagagctccgaggttcacagacacgaagcagcacaataatccattccatgcggttcctcagttgacatacttggcaaaccattccagcatattttgatgagcttcctctgcacacttcacagcagatttgtcttctacattgtatctcaccgtccatccgtgagagacttttggaaatattttcacatacccatcgacctcaggtttagcagttaagacctcttctaattgcttcaagagagctgggggagaaatctgatcaaactcagctcccagtactgcagtgggaacctcaaccgtcttgatgtcatctacagttacgaaagagggatgtaacagcacagcagcttggatgaactcgcgcttcgctagttgaaccgctactttagcaccccagcagaagcctgcagcaccaattgcagttatacctttgctcttaataccctgaaaaactggctttgcctct

SEQ ID NO: 399 - DNA, 929 bp, Citrus
  misc_feature (771)..(771): n is a, c, g, or t
gctactttaaaaaataaatccccactttatttttgacattgaaatcagaagcaaagtagagctttagaggcagtgatggagtgcatttacaggaacccaaatgcccatgttgaggatcgaatcaaagaccttctctctcgcatgactttggaggagaaaattggtcaaatgatccagatcgagcgcaaagtcgcaactccatctgttctcaaagacttatctattgggagtattttaagttcaggagggagcatgccgtctgtgaatgcgttttcagctcattgggcggatatggttgatggattccacaaggcggcaatcgcgtcgaggcttgggataccattgatttatgggattgatgcagttcatggtaacaatagtgtatatggtgccaccatatttcctcacaatgtcaaccttggggcgacaagagatggagatttggctcgaaggattggggttgcaacagctcttgaagttcgggcaagcggcattcattatacttttgctccatgtgtggctgtcggaaaagatcccagatggggaagatactatgagagttatagtgaagatactgagattgttagaaaaatgacttccattgtctcaggcttgcagggacagccacccaaagagcaccccaaaggctacccatatgtagctggaagaaacaatgttattgcatgtgctaagcattttgttggagatgggggtactgaaagaggtataaatgaagggaataccatatcaacatatgatgacttagagaanattcatatggcaccttatctggactgcatttctcaaggagtttgtactatcatggcatcctattctagttggaatggtcgcaaactgcacgcagaccattttctcctgacagaagttttgaaaaataaactaggttttaaggcgtttgtaatctctga

SEQ ID NO: 400 - DNA, 805 bp, Citrus
cacaacatataattaaagttctctttctaattagtaacagataatatttattatacagtttgttttacagctatggctatcctaagaaatgcaacagcattatttgtgttgctttactgtcttgtgtcctgctcttgcgttttagggcgaccggctacttttcttgaggattttaaagtcacatggtccgatgcccatatcaggcaaatcgagggagggagggccatccagctagttctagaccaaaattcagcatttttaggatgtgggtttgcttccaaaaggcagtacttgttcgggcgtgtaagcatgaagatcaagctcgttcctggagactctgctggaactgtcactgcattttatatgaattccaacaccgaaaatgtgagagacgagcttgattttgagttcctgggaaaccgaaccggtcagccttacacggtccagaccaatatctatgcaaatggaaaaggcgatagagaacagagagtgaacctctggtttgaccctgctgcagagtttcacctttacactattctctggaaccatcgccatattgtcttctatgtggatgatgtgcccatcagggtttacaaaaacagtggaagggctccatttccaatgaaccaacccatgggggtgtattcgacgctgtgggaagcagatgactgggcaacaagaggtggtctagagaaaatagattggagcaaagctcctttttatgcttattacagagactttgatattgagggctgcccagttcctggaccagcaaactgtgcctcgaacccagggaactggtggg

SEQ ID NO: 401 - DNA, 586 bp, Citrus
atttaagtgaaaaattgttctgtgtcagacaagctgattattatttcatacaagtgacattgcggtacagaagcttgtatcatacaataattcacaagggtaactcattacgttgtggttacctgaatctaaaaaaaaaaacgcagcatccttacaggcgcccatacgttgaaagcaaatctcttagtttcgttgcctcggtctccaggtgatcaaaacttgtggaactaggaatcctccaactccagtttccgaactgagtagcaggaatgttcatccgggcagaaaccccaagccgaaggatatcttgcataggtatgactgcagttcgggccactgaagataaagcagcttggatgagttcccaggagatatcgtcttcttcagatatagaaagatacttcattacattggacttctcttcgttcttcaaagtgtcccaccaacctcggatcgtgtcattatcatgagttcccgtgtacacaacttggttgcgctcatgattgtgaggcaaatgaggattcttagcatcactcccaaaaccaaactggagaacatccattccgggtgccccaatagattttct

SEQ ID NO: 402 - DNA, 822 bp, Citrus
tttttttttttttttgattgcataacctgcgcgttattactgaaggttcagatacaatttcacagcacgtagtcagtagtctgacaaaaacagtaaactatctagttgataagcagtaaccacaactttagcaaagaaacatttacaccatggcacaggaaacattttacacggtattggtctccaatacttcgcatgaaattgcaatgttgcatgcaggttgtcctctcctcgtgttcatcctgacttccccaaattgatgtgatgcaaaaattaccagaaagggtaattcaacgagtctctcactgtacttttattctcaagattggtaagtggaatgctgatgcacagcaagaagatctctcgaacctcccatattaaatagaacctgatggttatttaattttatacattaagaggttgctcttcttcatctgctagagcatagaccacagccgttctgcttggcgcatataccaagaaggaatgaggtcggtcatcataccacccttccgagctgaagtactcggcattgtggtcgagccttttgtagcctccaaacagtggatcatctgaatccaagacaatcttatacttccctggcttcaagcagcccacacgatagtcggaataactactattccaatgaaagttgaagacaaaaacaagatttcctctttcaaagactattaccctgtctccctcgtccttccgtgacacatattggtgctcagaagtcatgaacccgtacttctcttcaagatgctgcattgcccgatcaaattcttgcattccacgatatctcagataatcagcatcccc

SEQ ID NO: 403 - DNA, 662 bp, Citrus
cattaaaagactctataatatatacacaagaacttgcttcttagacattaattacttaaagaatcatatgctaatagcatttcccttattgcaaactcaatgcttgagattttattccttactattttaggatgaattataactacccaagatgcagcttcctggtgtgtttagtgactaataatgttggggtttattgttgcacatgtagcatcatcataaaatttcatgctcgacctgctgccactttgttccctatatctctactggcatatgaataatatgtgtattaattagtaactttgttatctattcttctgtggtctctttctccccctcctctgttagacgatttctcgagcttttatgcacagattaaatatgctataacattgatcagaagactcaagcatactgccaaaatcttaatcttgggtgaagctgaagaatagtccatttctggaagattcccttttattccaatgttataaactgggttaccattaggataatagagtccataatttctctctgacgtcggaccgggcttcaaattctcattaaaaagtgcaaaaaaatagacgtcaacaggaactgatggttttccaggggtgccttgcttctgctgtatcccttttcagcaagttcccattgtacaattc

SEQ ID NO: 404 - DNA, 774 bp, Citrus
agttgacttcgctttctttcttccgtaaattgaaatcggtaaagcagcaattctgtagtgacccttgaacttgaaatggcggatccagctgtccagagtctccatcaaactgaacccataaaagaaatcgccatagattacaccccggaagcatgcactcactgcgcagactccaattcgatcacactcaccttcgatcaccgcggcggagccaggtggcgctccaccactcgcttcctctacggcaccttcagctccctgatccagtgccccaaaggcaacactagtggcctcaacttcaacatctacctttcttctctagaaggcgacaaatcccaagacgaaatcgactttgaattccttggcaaggacaagactatcgttcaaaccaattattacactacaggaaccgggaatagagaggagattcatgatctggggttcgattgttctgaaggatttcatgagtacgtgatcaagtggggtccagatttgatccagtggttgattgatgggaaggtggtgaggagagctgagaggaacgagggtgaggggtttcccaataaaccaatgtttttgtatgcttcagtttgggatgctagctacattgataaggccaggtggtgtgggccctacgtgggctgtgacgcaccttatgtttgcctctacaaagacattcatgtgcctgttgccactgcggtggagtgcccttgtgattcttgatttggtgagtggagtatttgagttgttctgatgtttcttgggattctgttc

SEQ ID NO: 405 - DNA, 799 bp, Citrus
  misc_feature (4)..(85): n is a, c, g, or t
cccnnnnnnnnnnnnnnnnnnnnnnnnnnnnnnnnnnnnnnnnnnnnnnnnnnnnnnnnnnnnnnnnnnnnnnnnnnnnnnnnnnactaacttctatttcaggtttggagcacaccgccttcaaggaaaactaaactatccccttctggtattcgccagattgctctagaaatacaagctacttcacagtgaatacttatctaatcaattttacgagattaacaacactgctgtgattatatattaagctgcttcccagaccttgtaatctctcccctccgttacaaaagaccaattttgggacccacttggaggttcataatgacctggtccaagcctcattgcaactttttcatcgatgatggctgcatatacatctctctctgccttcacaatttcaactctactacggcagtggattttattcctttttctcacagagagaagagcttcaatctcctgtcgataatgagaaaagatatgatcatagaacactgatggtgttcctggatgagttaggatgtaagcatatccttgcatttcccttccacctggaaatctccaatgaccctgagtagaaccagtgtcatgattctctataaaggtaacagcacgagacggccaccatccaacaaccccagggggctttcccttctcatctgataatcgccagtattcacatctatccagggccgaatgaagaatccctttagtggtgacatcaaagcaccagcagtgccactggcggcattgatccagtcaaatattctctgccgatgtgcatcttgattgtgatcat

SEQ ID NO: 406 - DNA, 602 bp, Citrus
ggaattctgctgtaaactcaagtaaaattctgaaccataatctgcatgaatttggatgggaaggcaagaatgctggcattaatgtacttgtctccactattgttaataaggatggtggtaccaacaaatcagataccgatcctttcattcagaatgcggataagtttgtatgcgcactaatgcctgaatcacctacaaaggtagtctactacacaccaggtgggcttctcaaattacagggcgtaaattttaagcatgcttctttaacctttctcctggttgtttactctcgatttttaaaagaagctaacaaagaaatacattgcggtcatgttgttgttaaaaggaacaggctgatagagattgccaaaggctatgtggattacatgctgggaaacaacccaatgaatatgtcatacatggttggatatggaaagaaatttcctcataaaatacatcatcgcggtgcatctcttccttccatggataaacatccagcgaagatcccttgtgcaaacaatcacttttttcaccactctgatctcaacgagttaactggggcaattgttggaggaccttttgataatgactcttatgttgat

SEQ ID NO: 407 - DNA, 490 bp, Citrus
ttttttttttttttttttttcaccaaaaaaaaaacctgttttgagtaacaaaattattttgttcgttaaaattggtgtttctgcctttttgcccaaacaaaagggaatttcaatcccttccctacatctttccgggcatttgaataatatgttttttaattagtaattttgttatctattcttcgggggccccaagccccccctcctcagttagcccatttctcgagcttttagccatagtttaaatttcctttaccatagttcaaaaaactcaggcttcctggcaaaatcttaatcttgggtgatcctaaaaaatagccctttttgggaaaatccccttttatcccaatgttttaaactgggttccctttgggataataggccccataatttctctttaacgtcggcccgggcttcaatttttctttaaaaagtgcaaaaaaataaccttcaccaggacctgatgtttttccgggggtcccttgctttt

SEQ ID NO: 408 - DNA, 627 bp, Citrus
ctcaggtataatggatgcaatgcaaatacagaaagtgagctgtagggatatgaatcccaccacatccgattcactgaggtatcattgattggcagaagctgaactaaatgaaacccagattccacagcccagtcaacaagtaactcaggtcaagaaactctccaactccaagatctgcttctgacctaacagagaatattgggactgctacaccagcacccctccaaggcatttccctcatcatgccacctgaaagaaaaatatatcttggctgattgttagagaagtcaacattcaaatttcgattggcaccagtttccaaagaaatgtttccagtcttgccagatttacaatacttatactttataggaaaatcgcccctttgtattacacagtcagcttcccagactgattcaccagcataactaagtttgagcccattctgaagcttccactgccccaacattgaagtgctaccgatcacatataccgatgtgtcttcctctatgtttggaatgcaaatcttgaaacggaccaggactgaatcttcttgttctaacttattctgaatgagtccatcagatctctctatgtccaagctaaaagaacggcaaaatatcacattct

SEQ ID NO: 409 - DNA, 283 bp, Citrus
ttttttttttttttttttttttttttttttagagacaaacatcatttactttattttatttatttgactcctcgatagggaggattggatggtctggtttacaaggagagactcttatttaattattaattaagattcattttattttcccttaaactattatattctgcaactcttagttgaagctaattgtgtatttaggttgcttattcggaagaaagagtccccagtgtttctcatactcagacccttgtttctgattctcatcaaacatagcaaacac

SEQ ID NO: 410 - DNA, 563 bp, Citrus
tttttttttcctttttttttgtttccagggagcaagcaacagatacgccaaacttggatggcaaggtttcctgggaagggcaaacaacatggtgcattgcgaaaccttcaactggagatgaacggctgaatgcaaacatacaattctgctgccaacaaccagacatagattgcagcattatacaacctgggggccggtgttataatcctaacaactattactcgcatgcttcagttgtcatgcacctctactacaaggccaattacaagctaccccacacctgtgatttcatgcagagtggtctgattatctctcaggatccatctgttggagagtgcatatatgaaccctgatgataatgaggggaaattatattgcttatatatcatactaaataagatagaagatgtgaaaaatcaggactgggtatatggaaattaaaagtttacattgtccatagttataaattgtatgtgcttccatgtgaagttatgtggccaatgatttaagggtatcaaaattcaatttgtaaattgctaatccgatcgaagtcaagctcatac

SEQ ID NO: 411 - DNA, 741 bp, Citrus
aggcaactcccctcactggagatgatacatcacttgcgatttatggcttctcttgggttgtgttagttggcatagtaatgatctttaagatatttacctttaatcctaaaagttctagcgacttccagttattgatgcggttgacacagggagcatcatccataggacttgttgctgccctcatccttgtcattatcttcactcgtttgtcaattgcagatatctttgcaagcatccttgcatttattcctactggttgggctatcatatgtctagctctcacatggaagaacatagtcaggagcctgggcttgtgggaatcagtgcgggagtttgccagaatgtacgacgctgggatgggtgtgattatctttgccccagtggcattcttatcctggtttccatttgtttctactttccagtctcgtcttctctttaatcaagcatttagccgtggactggagatctccctcatcctcgctggaaacaaggctaatgttgataattgattggtggtctcctattggaacacattcagccagtctaacctctgtaggttgtagatcccttgtatgatatcatatcctgcctcaccctttcctagttgcgaggatcctgacacgcctttatatgtacagatggttataaaggcgtggcctttttcaattttgtatcttgcttcagttatctgcttttattcgagtggctggatagacgagttagtttcggtgcaatttggga

SEQ ID NO: 412 - DNA, 630 bp, Citrus
attttgtcctgcactgataaggaaaaactgttacctcaagtggatatgggaaaatcgatagttgctccatttggaaaagggaaatcgaaggctgttcttataacatctttgatcccttcttactacgagaaaatgaagaatatgtacctgaagcatccaactttgaatggtgaagtggttgctgtttatcaggctagtcatgaagtgacacaacacaccatgaaaaacgtgcacaaccagaaggcatgggccgaaatcaatcttctaagtatgatggatgttttagtcacaagcgcagggtcaacattcggctatgtggcacaaggtctcggaggtaaaagaccatggattctgtacaagacagaaacacagaaaatcccagatcctgtttgtgggcgagccatgtccatggagccttgttttcattgtcctcaagtatatgactgcaaggcgaaacgtgaagtagataccgctactattattccatatttgaggcactgtgacgatttgtattggggaactaagctgttcaatagttcttctcagaagccgtagtagtagctttaaaattttttcattcttggacgacttctgcagttaataggaatggttgtctttgacattcttttc

SEQ ID NO: 413 - DNA, 462 bp, Citrus
ggcacgaggcacacgtgtcggcccagcagtgcctcagatcgatcttgtcttgcaaagcagcgacgtgtactggagaatttttggtgcaaactcaatggtgcaagtcaaaagcaacgtgatgtgccttggttttgtggacggtggagtgaatcctaggacttcaattgtgatcggaggacatcaattggaagacaatcttctgcagtttgatttggccacatcaaggctaggcttcagttcttctctcctgttccgtcggacaacatgttccaattttaacttcacatctactgcttgattagcaattgtttgcgtatttcagtttcaagattatgtaataaataaattgtcacgtggttaattacatttctgtttttccaataaaacttttccttgtttggctttcggtgtgagtcgagaataaaaaaaaaaaaaaaaaacaaaaaaaaaaaaaaaaaaaaa

SEQ ID NO: 414 - DNA, 619 bp, Citrus
gaattcggcacgaggcctcgtgccgaattcggcacgaggacagtcctggaaacttcaatctacaaggctcttgttcaagcctttgctagtgccatgcctaaagtcgccagagtggctcctgtggcaccattcggggcatgttttagactgcaagacattggtttcacccgtataggcccagtcgtgcctcaaatagatctggttttgcagaacaagaacgtggtttggagtatccatggacaaaactcaatggtgcagattggcggcgatgcgttgtgcttggggtttgtggatggaggagtaaaccctaggacttccattgtcattggagcgcgccagctggaaaactatctgcttcagtttgatttagctacttcaagacttggcttcagcgactcactactgttcgagcgagccacttgcaccttcaactttacatccattgcataataattttaagcatgtttgcctgttatttgtgtgatgaataaaatggtcatggaccaatgattcgacgcaatggtcagaccaaataatgtaccttgctgcacttgatcaatttaatttattattaagagaataaaagatatatttttgaagtaaaaaaaaaaaaaaaaaa

SEQ ID NO: 415 - DNA, 694 bp, Citrus
ggcgaccccactatggcttttttgttttgtttcttaccatgtggaaaagctggggaattcgattccttttggccttttgggtgatgatatactagctatttgcggtggaacctgatctcctctctttagatttttcccttctgtacattgagggagaggcagtacttttttttgtacttttcccctctttcctttttaaaatttaatggaattgttacccacccatccaccgtagtagtaaaacctcatgttgctttgtccataaaaaaaaaaaaaaaaaaaaaaaccctcgtgccgaattcggcacgaggcaaggacccaacaacttaagaaccctaagttgaagatgaaggtctcaatctcttatgatttggataacccagatgttaaagataagaaggctgaagagcgttccaagaaaagtaagaggaagcatcgttctgatttggattccggtagtgatagtgaggcttcagtatttgaaacagatagtgggtcgtcatctgtgacggggtcggattattcttctcttgagagtagctcatctgacagctcatcatctgactcagaggaagagaggagacggcacaggaagaagaagaggcagaggaaggggcggcgtaaaaggtacagctcatcttctgattcttctgattcagattcggcatctgaatctgactctgatgataggagc

SEQ ID NO: 416 - DNA, 779 bp, Citrus
gaggcctcgtgccgaattcggcacgagggttaaaatcaccgggatcaacatgggatgagatagactttgaattcttgggaaatttaagtggtgacccttatactcttcacacaaatgtattcacaaatggtaaaggtgacagagaacaacaatttcacctctggtttgacccctctgctgcttttcacacctattccatcctctggaatcctcagcgcattgtgtaagtattttctttctccttcaatcttaattaactatgtttttgccttctcgttaatcagattagtttagacttaagagttttttccttgtaattttcagcttctttgttgatggcacccccattagagaattcaagaactcagagtctattggagttccattcccaaagaatcagccaatgaaaatatactcatctctctggaatgctgatgactgggctacaagaggtggccttatcaagacagattggacacatgctcctttcactgcttcatacagaaacttcaaagctaataatgcttgtgtttggtcaaatggaaagtcttcttgcgcttcaacttccttcagatccaggaacagttggttgtcacaagagcttgattcaacaagtcaaaacaggctgaaatgggttcaaaagaattacatgatttacaattattgcactgacaccaaaagatttccccggggcatccctaaagaatgcagaacctcctagagaatttgcttaaatcacaatacattcatcaattcatttctttctttttttttttttg

SEQ ID NO: 417 - DNA, 646 bp, Citrus
ttttttttttcaataaaattcgtattataacatttctgatataaagaatgacaaatctgtctttttatttatgaccactgcaaagaatagctctacagagagcatataattgaatgtaataagtttacactgatttatctgttgatttaatcgcttctttaggagattttttcatttcaaagggaggccttgaggaaatctctttgcgtcggtgcagtagttgtaaatcatgaatttcttttgtacccatttcagcctttcttaacttgttgaatcaagctcttgtgagaaccaggagccgccgctggatggagatgaaggtgaacttgaagcacaagaagatatgccattagaccagacacacgcatcagctttgaagtttctataagaagcggcgaaagaagcatgagtccagtgtgtcttgataaggccacctcttgtagcctagtcatcagcattccgtagagaagagtacatcgtcattggttgattctttggaaatggcactccaattgattctgagttcttgaattctcttatgggggtgccatcaacagagaagaaaatgcgctgaggattccagaggatggaataggcatgaaaatcagcagtaaggtcaaacccagagtgaaattgttgctctctt

SEQ ID NO: 418 - DNA, 695 bp, Citrus
gggaagagagataccagctttggtttcatcccacgaagcaatttcatagatatagcattctttggacaagcaacaacattatattctatgtggatgaagtaccaataagggaagtcgtgcgctcaacggcaatgggtggagatttcccatcaaagccaatgtcattgtacacaacaatttgggatgcctcaaattgggccacatcaggtggcaaagccaaagttaattacaagtacgcaccattcacttctgaatttaaagactttgtgttagagggctgcccggttgatcccattgagcaagtcccctcctccaactgccaagacaccgattcccggcttgccgagaaaggcctctccgtcatcactccggccgggagacgggccatgcgtagattccgggaacgttacatatactattcatattgttatgacacaatacgataccccgtgccattacccgaatgtgttcttgttccatcagaacgacaacgttttaaagacaccggtaggttgaaattcggcggcagccataagagtcatagacataggtcgaggcggcagccgggagcttcaaattccgaggatccggacatgtaaattaatttattgtggtggtgtttttatgttcatgattatttttttgttttttttgtttttttgttttaacgtatagctttgttttgtgattagaaa

SEQ ID NO: 419 - DNA, 437 bp, Citrus
acgaggccgcggtttgtgctttcgcgtgatatagagttggctgggaagcgactacacgtatgattgttgcaacctggcccgggggagcaggagtactcatcgatgcaagacttagacctagcaagtttgcactgagccgagccgcaacgggcaggtttgtaagaagttgagacatagccttggtcacaatcaacccaaagaaactggccacctagatctagggttaatttgacgggaacaagtggggttctttgtttgatttgagtaaggtattggagagttgatgaatctttggataccagaagagctaacgcttttggttttgaagatgtattggatatggaagtggtgggagggatgatgaacaatacaataaagcaaaagagcaggcaattgtacgagaaaaaaaaaaaaaaaaaaaaaaggggggcccggta

SEQ ID NO: 420 - DNA, 511 bp, Citrus
gaggaacaggaccatctacggacgaccggtctttggggaaagctattggagattatcttggatcttcgtttcttcttctttcagtatggcattgtatatcagctcggaatagccggcggaagcaccagtatagttgtttatttgctatcttggatagtcatggttgtggtggttgcaatttacatcaccatagcatatgctcaaaacaaatatgctgcaaaagatcacatctactatcggctagtgcaactgctagtcattgtgctagtagtactagtgattgtcttattgttggagttcactaagttcgacttctttgatcttgtgacaagtctcttggcattcatccccacaggatggggcatgatattgattgcccaagttcttagaccttttctgcagtccactttggtctgggataccgtggtttccttggctcggttgtacgagttactgtttggagtaattgttatggccccgatggctttgctttcgtggttgcccggatttc

SEQ ID NO: 421 - DNA, 617 bp, Citrus
gcacgagggagcatcatcatgcaattgaggccatcaagtggggaactgattatttcatcaaagctcacactcaccctcatgtattatgggttgaggtgggtgatggagacaccgatcactactgttggcagcggccggaagacatgacgacgtcgcggcgtgcttacaaagtagacgagagaaaccccggctcggatgtcgccggagagacggcagcggcaatggcggcagcatcaattgtgtttaggaaactaaacccacattactctcacctactattgcaccacgcgcaacagttgtttgagtttggtgacaagtacagagggaaatacgacagtagtatagaggtagtgaaggggtactatccgtcggttagtggatacatggacgagttgttatgggcggctgtgtggctatacaaggcaaccgacaacgaggcgtatttgaagtacgtgcttgataatgccgatcgttttggtgggatcacttgggccattactgaatttagctgggatgttaagtacgctggcgttcaaatcatcgcttcaatggtgaataatcacaaggaacacgagcaagttcttgaacgatacggttcgaaagctgaattttatctc

SEQ ID NO: 422 - DNA, 419 bp, Citrus
ctcgtgccgaattcggcacgaggtaaacatctatcctttcctaagtctttatggaaacgatgacttcccttttaactatgctttctttgatgggggtactcccattgttgatagcggaactgggattcaatacacaaatgtttttgacgccaattttgacactttggtttcggctctgaaagctgttggccatggagacatgcctatgattgtaggagaggtgggttggccaactgatggggacaagaatgcgaataatggtaatgcttatagattctacaatggacttttaccaaaacttgcagccaataaaggcactccactgcggcctggatatattgaagtgtacttgtttgggttagttgatgaggatgcaaagagtattgatcctggatattttgagcgtcactggggaatct

SEQ ID NO: 423 - DNA, 828 bp, Citrus
taattcacattttcatactcgtgatcccgaaatttaaaatgaagaagaggaaattaaaaataaaataaaatgaagatgaatcgcctttcgccaggggtgggtcatctgtcaatcccatggactcaatgaacactcgacgggcaaggttggaaatctttcagtatccttgcaataatcataaataacaaggtttctcagaacccaagcatggtccagtttctgagaatcagagagatgccaggcatcgtattgatcccaccaattcttagtggttgttgatacgcattcagggtagggatcttcccattggcatccatcaacactgaaatccttgtaagatgaaacaaacggagccttcttccagtcagtcttttccaggccccctcgcgttgcccattcatccgcattccatatgctggaaaataagtacattggcttctcattcgggaagaaatcatttgctttcccattgtttttgaacactcttattggaaccctgtcaacaaaaaacacaatctggtggttgttccataaaatggaataagtatggtaatcttgagttgggtcaaaccaaagcatgtgcctcatctctctgttaccagtcccattcttataaatattcgtttgtataagatatggctgccctgttctattccccaagaactcaaaatccaattcatctcttgttggccctgccccattctctgtacacatatagtaagctgtaacaacaccggcagagtcccctccaaccagcttcagtttcatgctaaaccaaccaaatctgtatctctgcttcgtttgaaacccacaacctgtttctttgtc

SEQ ID NO: 424 - DNA, 713 bp, Citrus
ttttttgtaataaagagaaacatcatgctactggttaaaatgcacacttcagaattccactataaagaatacaaccgaattcatcctaacaaggtagttacaataacgattcctgaagaaatcctttgttctgtttgtacaaaatcgaatgaacttatcatagaaattagcctgccatatgttcaattaactttgccaccccacatctcttcgggaggaccaaaattgggtgtactcagtgttttctgacagaaacgagaatggatatttctcaaagctcccactgccggaacgaattccaagaaatacaaatgtttctacaaaaaaactgcagtcatgagtgtaacgccaaaaatcacagagcttgtgacaagatcaccaccatagacatattttggagagcagccagaagttgtagtatttgaggaaggagccagtgatgttccatttgtaatggtgccatttcttccatggcttcctggaaatatacaagaaccatgacttgggtcagtggtagtaattgtagcgacccctttgaaatcacaggtcccaggagctttagccatctgttgataatatgcattgaaagcatacattgaatgcgaaatcacattatctggctcataacatggctgaccctgcagcaaggctgagcaatcaacttttcctggaccacaagcccaatccagagcagcctgtagcatcttttcctc

SEQ ID NO: 425 - DNA, 797 bp, Citrus
ttttttgtgtgcactcagtggagcacaaaaataaaattattgattgttttgtaataatttctggtgtacactgattggatattatattataatatggaaaaaaaaattgaattctcaactacagttcattacaaagaatttgcttagcagattcaaaatgcaaaatgtgaaaaaacaactgtattagaagcaccaaaaaaagtgtctattatccccaggaaactttatggcagtttctacaatgatcaatcccgtaggtaacatgcctgtctgcacttactttgcgcatcagttcaacttcaatagctacttcctcaacttcttctctcatgaatgagcaagctcttagctcattcttccatgaattttttgcgaccgcgatcatctactttctttggttttgagaagaaaggatcccactcatgaggtcctactgaacgctgtccttcatctaacaaagcatatttccagccattctgctccacaaaattatcatattctggaagaccttcaatggtgagcctcctcaaccttgttactctgtcaatgatcgactgtacagcaacatcaaaagaatccttgagagtcgccaattttgagcgaggatctgcatatatcacccttggaatgagattgataacagtctccctcatctccttaatctgctcgggagaaatttgtttcagtctttcctctatgcttacattcctcttacggatgtcatcctctggaatgaaaacagagtatgaagaataattctttgggagatgccaagtatattgtgtgtaagctgaccc

SEQ ID NO: 426 - DNA, 833 bp, Citrus
tttttttttttttttttactaaatcaatattttttatttttttacgaattcacgaatttttgagaatttacagaagtgaatccatatctaatccaccaactacggattttcaaattttcaatcaaatccaatccatcaatttacagatcgaatttttacgaatcaaatttctacagattgagcggatcagattggattctgaacacccataccagctagtgtagcaaaatatcggtggacaaatgcatttctttctcttcacaagctgattggggttctgaagtacagaacatctctccatcaatgagaaaatttctcatttgagtgacttaacaaagatgtaattagtcttctcgttctcgaatttctgcaagtatctgttcggaatgcaaaatgacttagattcttaagatccggctcagtttataaacctgggcagtcctactaggtagaggcacctctatgcagtttcgcaaaccatcaactcttttgctgatggtcctttgaagatattggtgctccttaataagtccttgacctccaaacttactttcatcagtatttagtattatttgatactctccagcttcttccacgcccacagagtagtcttcataagaatctgttggatgaaagttgaatatgaagacaagaggacctctcatataacatattaccatcttggcatcattcacatggtgaacgctaggcgaacctctcagaagcacctttgcattttcatccaacttcatcagttcctgatcaaaggaatataagttggaatgtagtctgttggctagcaaatcccagtgacgattggcaagagaaaatga

SEQ ID NO: 427 - DNA, 840 bp, Citrus
tttgaacctcagatattcaatttattctcttgaaaagtaaaaataaagattgaactcaaatgcactgaagctctgatatttacataattataaacacgaatgtcaatatgtatgccagcagaccaacagaccttgataatctcctctcccctgcgcctgcggtagtatctgttttgatcatgatcctgaataggcaatcccctgtggatggatttgtggtggtaacagccgaaaggtttggaaacctgcatgcactgtcaagctgattatttatctggtagtagctgttgaatgcatatgaaatgttcccacgagcgtccaaattcccacaggaagttccatatccaagacttgtgcaatcagcatttccacaagcataactcacactagcagcaacttgtgggtcatcaaggcttgcggagggtgacataacacaccatttctgggcaagataatgtacatccttagctgctaccaaaccattccttccatttccaaggctaagctggtacttgggttgtccatcaaagtaaagtaagccccaatgccgttcaaaattccctggctgaatgcttttggcatcttcatctatgagactaaataagtacgcatcaatagcaccagatcgcattggggttccctttccagcattgactcgtgacatgaaaccttggttgaaccgctgggcaaactttagatttgcgtttttgtccccgtcagtaggccatccaatctctccaacaataatggacaagttaccaaatccatttttctgtaacgcccatacaagcgtatcataattcgcatcaaacacattttcatagactcttccattatcat

SEQ ID NO: 428 - DNA, 822 bp, Citrus
tttttttttttttttttatctcatgataccttaaacccactgttatttataattaaaacagaaactggtgatcatgattagaccctaaacgagctttatgtagccattttcgatcatccatttgagactccagtggttcgcctcacatttatgagcccaatatgcccatccaaatgttgctcgcccatacacgtcaagttgagcatttgcaaatctctggtagtcctgctttgatgcgtcctttacattccattcacatgtccattccccaacaaaagttagagggccattagaagtagtgacggcgccaagatcagaagctcgttggttgttgacataatcaatgttctgttgcacattcaagccattgaaattgttgctgaacagattgtagtaatgcacatcaatgactacgcgactaaggccacttgcaaatgagagtagctccttatgatcagcaggtcccagacgattggacatgatcacgtaagcagttgaagtgtatttcctcacagcatcataacctgccttgtaataacttttcaaagtgtccaaagcgaccccaggagcaagcggctcattaatcaactcaatggcagcaaggcttggcctattacaatatcttgcagccagaaagtcaattacagcaacagtatctgctatgttagaatctccccattcctggaatccatctcttgtcgcgctgtgttcattgccgttctgcgaacctgggaccgcatgcaaatcaacaataaccttcaccccatatttttctgcccaatcgaaagcattgtctaagacttttgatgagccccctacaaa

SEQ ID NO: 429 - DNA, 857 bp, Citrus
caaaatcaagtgaagcacaaatggctcttttactactaaacaatctaattttagcattcctcttgttcttttgcattatggcacccaaggtttcttcacacaacagggcttacgcgcccccaagtgttgcacgcttgacagatctttttggtcacgtctcagttgatcagggcttttccactttcttcggaggctcaaatgtcaagcggatcaataatgggtccatggccactcttgctcttgacaaatcctcaggctctggattggtctccaggaacaaatattaccacggattcttcagtgctgctataaagttgccatctggtctctcatccggagttgtacttgccttctacttgtctaatgcagatagctatccgcacaaccatgatgaaattgatattgaattgcttggtcatgataagagaaatgactgggttctacaaacaaacatatatgcgaatggaggtgtcagtaccggaagagaagagaaattttacttctggttcgatccaacggcacagcaccattactacagcattatctggaacagccatcacattgtatttctagtggacaatgtaccggtgagagagtttccaaacactggggccttttcttctgtatacccatcaaagccaatgtcagtttatgtgacaatatgggatggatcacagtgggcaactcatggaggaaaatatccagttaattacaagtatgcaccatttgtggtttcactggctgaaatggaaatggctggctgtgtgttatcaaattctgcctctgctcctgcttcgtgctcgaaaggaagtgcttcaagcttggatccagttgatggacaaacatttactacactt

SEQ ID NO: 430 - DNA, 689 bp, Citrus
ttttttttttgaagaagtccgaatttgatattgataatgaaaacacgagagacttgcaaattactactattaaaactggttactacaaatgagatagtctgattaatttaaacgaaaagctagcctttctttcgtctcctaattgtggtgtctttgatcatgctggatacttgcaggtgccccaagatggattctgggtgacgatgagaccagtgccattgaagtggcagttccagtaattcttgccagctgacttgtaaaagagattcatagcaaaagaagcatgcgatatgatactgtctggattgaagcagctgccacctggctgaattggcctacagtccactcccttctgccgacagctgtaatcaatgttgtgattgaggctctcatcgtctgttgatggcttagcaatgcaccagctggtcaccacgccttcatttctcctctcttcttggactcttccattagaatgcgtactacttaactccgcatgccctgaacaatccgcaaaccagaacagcaaagctaatgctagaaggaaaaacgccaaagcgtgtcttgtgccctccattgttgtgttgcgttggtgcctaatcctacctcgctggggaatgtgcaagtaaatattgaggagattggtacttatagtgaaacgagagagtgcattacagatggagatgggcctc

SEQ ID NO: 431 - DNA, 886 bp, Citrus
tttttttttttttttttacaacaaagcatatggttctgcaatataatgccacgtagtttttgcgaggtacattggtgaaatcattacaactgtgggtccatgccgtccatgtcccatttattggttcattaatatcgacacctcttaaatgcataactaagtggatgtgaagttgaagttggagcacattgttcgctggaggagtaacgaattgctgaacccaagtctcgaagaagctatatcaaactgaacaagattgttgtccaattgatgccctccaataacaattgaagtctttggcgtcacccctccatccacaaaccctaggcaagacacatcgttgctgacccggacgattgaatttgccccgatgatgctccagagcactttgctattctgcaaaacgagatcgatttgaggcacagatggtccaagacgggagcttccaatgtccctggagttaaagcatgccccaaatggcacaactggagccaccctggtgaccttcgttggcatggcatttacaaaagcttgaagaagagccttgtagattgaagtttccaggacggtgtaaggaacagcagtgctgaactttgttcctccaatgccttcactgtcgatggatagcaaagttgtgtttaatgggatagctattccgcccactttaatggattttacaccaatgaagtattcatttgaaggcgtgcctaagaaacctccttcggtgtttacctggttgattaaaagtggtgtgtaagtaagagattttgatacatcaacattagggagaagtacgtaaggcccgtctccgataatgatgacaccattagaacgagctgaagggctcaagcaaattgcgaattttctattcaagctgaaagcagca

SEQ ID NO: 432 - DNA, 782 bp, Citrus
tttttttttttttttttaaacaaaataggtttggtataccaaaaaaaaagctgttttgaaaaacaaaattatattgttcgttgaaattggtgtttctgactctttgatctaacaaaaaggaatttcaataccttacctatatctctactggcatatgaataatatgtatattaattagtaactttgttatctattcttctgtggtctctttctccccctcctctgttaaacgatttctcgagcttttatgcataaattaaatatgctataacataaatcaaaaaactcaagcacactggcaaaatcttaatcttgggtgatgctgaaaaatagtccatttctggaaaatacccttttattccaatgttataaactgggttaccattaggataataaagtccataatttctctctgacgtcggaccgggcttcaaattctcattaaaaagtgcaaaaaaataaacgtcaacaggaactgatggttttccaggggtgccttgcttctgctgtatccttttcagcaagttcccattgtacaattccgcattctccaccgtagctccagcttcgttttcatctcccttagaaggccaccctgtctccaaaatcctaacctcgatatccgagtgccccattgctttcattgctgaataaacagcgtcaatttgggcatacaacatgttgtcatatttcaaattggtaattggatccgtcgtcccttggttaggctggaacagcacgtagtctaatggaacctgatttgggctgtccttgtatgcaaa

SEQ ID NO: 433 - DNA, 920 bp, Citrus
actatattctattggaaatataaaatgttgcaaagcttacaactcacaacaccaaaaaaaaggaaacaagacgttcaaagctgtttaaaatacaaaagaaaagaaaagattccttgcaatataattgagttcgtcatttttcttgaccactcctcaattctcactctttacctgtctctatcccgataaaaccatagaaatagaggagaaagaggatgagcacttgctttaaattgtctcttctctcctttcatcctcaaatcttcgaccttatttaacctaataccgtctaaaaccaagataccaaatcaacaagaaaagttgaaagtcccccctccctcaaagaaaaggaaaataaaaagaaaaccttttctggactgctttctgtataataactgcacaattcttacattacaaacccagaaaccatgagattctttatgtgtaatagttgcttttcttttttatgccaatgtgtaagcagaaactgagacatctgcagcattagcagtatggatgtagacgaattcaaggcttttgccagcagccaagttgttgagccatgatgggaaaccataagcattgccaagatttgttagaccccatagaggaccatacagcttggatattgaaagcttcagattcttgagggtcttggctgacttattggtcactatggtcgaatatctgtagtacctttttccattggagatccatgaagttgtcagcttctgctgtatggcaataggaccagatgatgaagctggagctggagttgttatgggttttgtaggtggaatagtttttggttttggtgctggacttggtttagtgacaacaggagtaggagctggaacaatcgctggaagaagctggttgtaacctccgtgaccggcattaagccttgccaatataccaag

SEQ ID NO: 434 - DNA, 949 bp, Citrus
tcttaactctcccatgccccttcaatggcttccgtgatcatcttacttctggggatgctaatcgctaccctggacacaacaagtgctcaaataggtgtttgttatggaatgcatggtgacaacttaccatcaaaatcagatgtaatagctctctacaaccaaaataacatcagaagaatgagactctatgatccaaacaaagaagctctcgaagctctccgtggctccaacattgaagtcatgctgggcgttcccaacgattttgacctcctccgaagaatcgcttccaatcaagccgaagcaaatacctgggtccaagacaacgtccaaaattttgttaacaatgtcaagttcaaatatattgccgtaggaaatgaaccaaaaccaggagacgactttgcgcagtatcttgtacccgccatgagaaacatacaaaacgccattaacggagctaaccttggaagccaaatcaaagtttccacagccattgcattcggagctcttgataaatcctctccgccgtcagctggctcctttaatcaagattacagaccaattctcgatcccctcattaccttccttaacgaaaacaattccccgttgcttgttaacttgtacccttactttgccatcgttggtgaccgtcaaatatctcttgattatgcactatttaggtcccaacaaccggttgtttcggaccctccgttgagttaccagaatctttttgatgcccagttggatgctacttacgctgcgctggagaaagccggtggggactcattggatattgtgatatcggagagtgggtggccgacggcaggtggtgacggagcgttaacgaatgttgataatgcaaggacttataataataacttgatacagcacgtgaagcaaggatcaccaaagaagccaaggcctattgagacttacatttttgctatgtttgatg

SEQ ID NO: 435 - DNA, 931 bp, Citrus
  misc_feature (897)..(897): n is a, c, g, or t
tactgcttgcagatgcagatgcagatgcaatgacttcaggtgcaaaggctgcagcttgtggtcgtttagcttctttatcagcagtttctgaaaaggtgtacagcgaccaaggggtgccggcttcttttcttgtacctgcaggagttgttataccttttggttccatgcagttggctctggagcaaagcaaatgcatggatacttttgtttcttttctagaacaaatagaaacagctggaccggagggtggtgtgcttgataatctttgctgtcaacttcaggagctgatatctgctcttcagccttcagaagacattattgaaagcatagaaagaatatttccagccaatgcgcatttgattgtccgttcaagtgccaatgttgaggacttggctggaatgtcagctgcaggactttatgaatcaatccctaatgttaacccttcgaatctaagagtttttcaaaatgctgttgctcgagtgtgggcttcgctttacactcgcagagcagttttaagccgtcaagctgctggtgtgtctcagaaagatgctacaatggcagttcttgtgcaagaaatgctttccccagatctctcatttgtgcttcataccctcagcccaacagatcatgaccataactctgtagaggctgaaattgcccctggacttggtgaaactctagcttctggtaccagaggcacaccgtggcgtctgtcttctgggaagtttgatgggctggtgaggacacaggcgtttgccaatttcagtgaagagatgctcgtatctggtgcaggtcctgctgatggggtagtgattcacttgactgtagattatagcaagaaacccttaacagttgatccaattttccgtcgtcagctcggtcagcgcctctgttctngtggtttctttcttgagaggaagtttggctgccc

SEQ ID NO: 436 - DNA, 594 bp, Citrus
ctctgcgttattactgaaggttcagatacaatttcacagcacgtagtcagtagtctgacaaaaatagtaaaatatctagttgataagcagtaaccacaactttagccaataaagaaacaagaaacatttacaccatggcacaggaaacattttacacggtattggtctccaatacttcgcatgaaattgcaacgttgcatgcatgttgtcctctcctcgtgttcatcctgacttccccaatttatgtgatgcaaaaattcaacgagtctcactgtacttttattctcaagattggtaagtggaatgctgatgcacagcaaggagatctctcgaaactctcatattaaatagaacctgatggttatttaattttatacattaagaggttgctcttcttcatctgctaaagcatagaccacagccgttctgcttggcgcatataccaagaaggaatgaggtcggtcatcataccacccttccgagctgaagtactcggcattgtggtcgagccttttgtagcctccaaacagtggataatctgaatccaaggcaatcttatacttccctggtttcaagcaacccacacgatagtcg

SEQ ID NO: 437 - DNA, 811 bp, Citrus
  misc_feature (40)..(40): n is a, c, g, or t
ttttttttttttttttcaaagcaaaacaatgatacatttngggggaaaaaaaaaggaaaaagattactggacaccccaccacggagtcataaagggaatgaataacaaaatagaaaaagctacagcatttgcgcttatttggttgccgcggagggagatgaatctcagcctatctgctgctccacttatttgagttgagtttacaactgctttcgtcttattgcttaccttcttactgccaggaaatatacagctcccatgacttgggtccgttgtggtgatcatcgccacgcccttgaaatcacaagacccggaagtcttcccttgctcatggtaatagctatcaaaggcataagaagcgtggctcttcacattattaggctgataacaaggttccccaggttgaatatcactacaattagctctcccagggccacacgcccaatccagtgctgcctgcaatgtctttgtatcaacaccatccattgcaatacaatatgtctggtttgttgtatcgttggccaaaaatgtcccacttcccgacacatgaagcaaataaacaggtgttgtattggcatgaaatagcccccaatttgcttctgatataggcggtgaccttaagtcctcattgaacaactcataaatatacacatttgaagtgacttctgggtgaaaaggagttccactacggtccaaaatatgcttaatcaaatttgaattatatgtatctgcattgtcaatagtagcataaggctctttagaatcacccttcgaaggccacccactttctgtaacaagaaccataacatct

SEQ ID NO: 438 - DNA, 744 bp, Citrus
caaatataaacgtctccaaatttagattcggcctcctcggtgtccctcctagagtctgtatatgcttcttcaaattactgttatacgtctttgcattttcaacactcgcatgtggcaggttacttccagcgctgggccacccggtttctgtcacgacaaccttgacgtcctccttgcccaccgccttgaccatcgccgcgatgaacgagtccacgatggagtcgaaaagattgaagtagttcctatctccatcttgagccacaggtgttgttgatcgaaacgatgcatagtctaatgtcacctgttgagggtcagaagctagggtaaaataaggatacacattgatcatcaacggagctcctttagagtacacaaattttgatatttcattcaaagtagtagccacttcagtagcaaatgagccgtttgatggtgggtacgaggaacctagggcagcagctgacagcacagttgatacaccgacattaggtacattttcttgttctagtacttgttgaatgttcttcatggccggcaggacacatacggcttcggtgccggggataatctcgttgccggctgtgatgtaccggagttttagggttccgtttccgcctttagtgtatggagtcacaaattctcgaacccaatttcgtgtgtagtccatgcttccggccatttgtgcaaggtcttgatttttcacccctaagcatacgctcaagtttgatgtggccaatgcactca

SEQ ID NO: 439 - DNA, 820 bp, Citrus
tagctacttaatttgtataccacgcaagtacgcataacattatccttttttaaattcattaaccagtgttacatatggtaaaaattggactaacatgccattttattgattacagagaaacaaagaatctgactccagaatctacatgaattgaataaccattgaatgattacacgaaagaataaaataatttttaagtgtcttgttgattattttctctaggagattctgcattctgcaggaaggccctgaggaaatctctttgtatcagtgcagtaattgtaaatcatgtaattcttctgcacccatttcagcctattttgatttgttgaatctagctcttgtgagaaccaagcaccgttgctggatgtagaggaagcagaatttgaagcgcaagaagattttccattagaccaaacacaagcttcagcattaaagtttctgtaggaagcagtgaaaggagcatgcgtccaatctgtcttcacgaggccacctcttgtggcccagtcatcagcattccaaagagaagagtatattctcattggctgattctttgggaatggaacgccaattgactctgagttcttaaattctcttattggggtgccatcaacagagaagctgaaaattaagtaaacattgataagtctaagcagattgaacgacaaggaaaaaacaaacgatggagattgaaggaaaatattgcttacataatgcgctgaggattccagaggatagaataggtgtgaaagtcagcagtggggtcaaaccagaggtgaaattgttgctctctgtcacctttgccatttgtaaatacatt

SEQ ID NO: 440 - DNA, 795 bp, Citrus
gaaagggactcccatgagacccaactgtgatttgaacatttatgtgtttgctttgtttaatgaaaatctgaagcctggacctacttctgagagaaattacgggctgtttaagccggatggatccccggcttattcacttgggattagtgcggtgaccgccgccaacaccactgtcgcttcccccactccccccgccctgccggatacttcctctggtaacgatcccgattctggttccggttccactggctatttgtccatctcttctgccactaaggcaagatatgagtttgttgggtccgtgatgctcgtgctggtgttctttttaatcagtttgcttctgtagctagggattgtagaaaatttggaatcggcattcaacgttaggcatgataatcaaaatcagccgttaaaagtccgtgaaacaataagagacagctttggggttggggaaaggtgaaattccgtgcctctttgcctttacgcaactcaaatgtttatggcttttccaaaaaaaaaactcctctaatgtttatgggaatcatcatcctctcgtcgataaagtagcatccccaatatataaatatattcccaatgaaccacctacagttgatctaatgcaagtgggttcgtgattgtcaaataccttgatcatcagtcatctcttttttcaggatgtggggcttgttagttggtagagcgtttgatacttaaatctgtgttacttttgctctttctagttgccactgacccacaactgcttcatttttgcaggggtgtatatttcaataactt

SEQ ID NO: 441 - DNA, 752 bp, Citrus
aaacactttcggttatcttgagttctctttagcttcccgaacaatattctgattcttctgtttgtatgctttagtgaaaatcacacttataatctgatgtacagaaactgaggctcgaatctgcaactagacagacataaagagttacatattccgaattctatggtgtctataaatccggtacagcagttcatcttggactctgtctagactctagaattacccttaatggtttcaataaccagccacatgcactgatgtaaacatgtccactctcagcgtagtaactacttattcaatagctgattatttgcagcaacttgactatctagacaaactataatctgccttgaggaaaagcagactaggccctgcaatgctgctgacacaattatgactaggaagtagcgaacaagggacatttgtagaatgacaatgtgaaaaatcagcacaagtctagcagcagtagcaagtgagcagaaactgaggatttcaagcatctcaaacctttttccagcattggccataaatcatttagtgcaaggatttctccttcttgtacgtcaacccaaatccgagaggaaataaagggtcatatgtgttatctgcaacattcataggtagccgttgaacgcttctaaaccatgtgactgggagtcgacctgtgaaatcatgatctccaaatacaacatcagcaattccacttccttcacttcctggcaaccaagcagcgaccagtgcgtctgcctttt

SEQ ID NO: 442 - DNA, 853 bp, Citrus
attttttgattacagagaaacaaagaatctgactccagaatctacatgaattgaataaccattgaatgattacacgaaagaataaaataatttttaagtgtcttgttgattattttctctaggaggttctgcattctgcaggaaggccctgaggaaatctctttgtatcagtgcagtaattgtaaatcatgtaattcttctgcacccatttcagcctattttgatttgttgaatctagctcttgtgagaaccaagcaccgttgctggatgtagaggaagcagaatttgaagcgcaagaagattttccattagaccaaacacaagcttcagcattaaagtttctgtaggaagcagtgaaaggagcatgcgtccaatctgtcttcacgaggccacctcttgtggcccagtcatcagcattccaaagagaagagtatattctcattggctgattctttgggaatggaacgccaattgactctgagttcttgaattctcttatgggggtgccatcaacagagaagctgaaaattaagtaaacattgataagtctaagcagattgaacgacaaggaaaaaacaaacgatggagatgaaggaaaatattgcttacacaatgcgctgaggattccagaggatagaataggtgtgaaagtcagcagtggggtcaaaccagaggtgaaattgttgctctctgtcacctttgccatttgtaaatacattggtatgaagagtgtaagggtcaccacttgaatttcccaagaattcaaagtctatctcatcccatgttgatcccggtgattttagctgcattagaaaaaaaaaagatatttatatgtatcatcacatatgattat

SEQ ID NO: 443 - DNA, 824 bp, Citrus
  misc_feature (4)..(4): n is a, c, g, or t
aaanttagaataaataaagggggaaaaaagaaaaaatggcaccccaaatcagcattcagcaaatcactagtctaataaacaagtcaatgaatcaatgctacttattcatcaacatcaccgaggggtagatccccaagcatccatggcatatatctcaaagggtcacacttgggaacttgcaggatccatgacttggatctttaatggtctgtttggcgagcccattgaagtaacaggtcccaccaagtttcctaaactgagaccaataggagctaaaggcataatttgctttccacaccaacgaatcgggtttagaacagggtttacccgcttggatcgggtcacaggttttattcccctgcgagcaggcataagaaagagccgatgacaatgcagtggtgttggctactttagctgccacgcaccatatcttccccttatacggctcgttattggtcggcttcggcagcggctcgtactccttctccggtgcatttccgctcaaatcaatctcatacacgtgcgacccgttcggatacaatagcccgaaatgcctctccgtacccgggcccggtttctgattctcgttgtacagagcaaagataaaagaaggcaaaacccatccgggtcgggccggggtgccaatggccggttttgctgtaagctttttgacaatattccggttgtaggtggcggcattgtaaatattggctccaatctggtcgtagtctcctccattgggccaacccgtttcggcgatgaaaatctggatgtccgggtacccgagcctcttcatggcaaaacaacggcgtctagcatctggt

SEQ ID NO: 444 - DNA, 761 bp, Citrus
aaaatggggatatttggttgtgggcacaaattggttggcctacagatggagtagccaatgccacctcatctactgctgagattttcatgaaaggtctgatcaaccaccttcgaagcagatcgggtaccccacttaggccgcggaatccaccgatagaaacatacatttatagtcttctagatgaggatcaaaggaggactgccactggaaattttgagagacactggggcgttttcacctttgacggccaagccaagtatcatcttaactttggccagaatgctgaaaagctagtgaatgcacgaaatgttgagtaccttccttccaggtggtgtgttgtgaacaacaataaagacttgtctaatgcaactgcagttgccttagaggcttgttctgttgctgattgctctgcaatctctcctggtggatcgtgttacaatatcagttggcccaggaatatatcatatgcatttaatagctactatcagcagcataatcaaaggcatgataactgtgattttggtgggttaggtttgatcaccactgttgatccatcggcagataattgcaggttttctattgaactccggacctcttattctgcttctcttcatggtgcctatcttttcctttggacggtattgctgatgttcagtactttcacttgtctgtcaaaatttacgtagtataaggcatcctacggctactatgatctgctctcgaagtttgattctttttttggaagcttttccatcttgatc

SEQ ID NO: 445 - DNA, 894 bp, Citrus
agtgtaaggaaggttaagcataagcaggagaaaaatgtcaggtcctcagtgctgtgcaaatccaccaacactgaatccaaacagtggagcaggtcatgttgagaaacttggtggactcgacacttacgtcactggctctcctgattccaagcttgctgctcttctcatttccgacatttttggttatgaagctccaaacttgaggaagcttgcagacaaggttgcagcagctggattctatgtggcagttcctgacttctttcatggggatccacatgtagatggtgggagatccctacaagaatggataaatgatcatggagtggacaagggatttgaagaggcaaagccagttattcaagctctgaagtgcaaaggtataactgcaactggggctgtgggcttctgctggggtgctaaagtagcggttcaacttgcaaagcgcgagttcatccaagctgctgtgctgttacatccctcttttgtcactgtagatgatattaagggggttgaggttcccgtttcggtactgggagccgaaattgatccggtgtctccaccagctctggtgaaagagtttgaagaggccttaactgccaaatctgaggttgatagctttgtaaaaatatttcctaaagttgctcatggatggtctgtgagatacaatgtagaggatgaatctgctgtgaaggctgcagaggaagcccatcagaacttgctggaatggttagccaagcatgtcaagtaactggacgaataaaataatactgctcgacggatgaagacttgaaagtctatttatcatgtgtgaatgattgaataactatctggactctttattgagtgtgatgttcatttagaatttcataatagcatatctgatgactgaaaaat

SEQ ID NO: 446 - DNA, 746 bp, Citrus
  misc_feature (5)..(5): n is a, c, g, or t
aacanacgagggataaattaattaaaatttaaaaacattagaaataaggttggaacaagttgtttgtcgggccaggagagatgaactgaaacctagcctagatttggcaagatcaaactgcagaagattgtcttccagttggtatgctccgatcacaatcgaagtcgtagggtttactccaccatccacaaatgcgaggcacattgcatgcttcccaactcgcaccatcgagtgtgctccaaaaattttccacatgcggttagtacctggcatatatagatgaatctcgggagcagctgcgccaacatgcgtgctgccaatgaagctagagttaaagcacgccccaaacggtgccattggtttaactctggggatgttagagtacgatttgatgaaggttttaataaaagctttataaattgatgtttccaagactgtgtaaggaataacggtgctgatctttgttccaccaaaaccttctttgttaatcgacagcaacgatttgtttagtgggacaacgttgccgcttatcagaatagactttactccaatgaagtattcagctgaagattctccttcgaaagaagccccggcagaactcacagggtttcgtatcagccgggtgtaaatgagagacttggggtcaattccaggaaaagaaacatcaccgaagaagacggcaccgtttgaactcaagcaaatggaaaattttctgtcaagtttaaaagcagcagcagagagttgag

SEQ ID NO: 447 - DNA, 749 bp, Citrus
tttttttttttttaaccctgcaaaaagatttttatggtgatttcttaatcctcaatgacatgtcattgatgcatcaccgtttcaaacgataaattggtggattcacgaccaacaaatcagagctggaaaacctttcctttccattggaaaaggacacccaaagaactgaagaagtacgaatttgatatttgataatgaaacacgagagacttgcaaattactactattaaaactggttactacaaatgagatagtctgattaatttaaacgaaaagctagctagcctttctttcgtctcctaattgtggtgtctttgatcatgctggatacttgcaggtgccccaagatggattctgggtgacgatgagaccagtgccattgaagtggcagttccagtaattcttgccagctgacttgtaaaagagattcatagcaaaagaagcatgcgatatgatactgtctggattgaagcagctgccacctggctgaattggcctacagtccactcccttctgccgacagctgtaatcaatgttgtgattgaggctctcatcgtctgttgatggcttagcaatgcaccagctggtcaccacgccttcatttctcctctcttcttggactcttccattagaatgcgtactacttaactccgcatgccctgaacaatccgcaaaccagaacagcaaagctaatgctagaaggaaaaacgccaaagcgtgtcttgtgccctccattgttgtgttgcctc

SEQ ID NO: 448 - DNA, 753 bp, Citrus
ccccccgggctgcaggtttttattcaaaacgcaccattaatctgtcctctagcttttaacaattaccgtaaatctattggtggcaataacaagaaaacttgaattgcttatttattgggctcgtataacattacataaagaagataaataacttcagaatatgcccgtaaatattgccattttgacggaggggaagtatagggctgattatgactagtgcttcgtgcataagtccatccaatatctaacctcagttctaccaggttcggctcaactatttctggtctcacagcatctgaaaacctacaccacagcaacggttcccttctgtggaactccacttagcggctttgatatagggttcttttcttggctactggcaacctgctgcttatcccgagtattggatgctacttcctgaccccctggaggacatgaccttccactcgcacaaacaagatctttaacggtcgttttcagttctttatccttctgtaaagactccaacgtgacatgtacacggtatctccaatagtgtcttggattcgtaggatcattgattgtttcctctgtagcagggcgagtgctgtaatcttcttttagtgctaacaagtcctgaagagggaaaattgcccacattgatggtgattcaacgtgctgccttagaatgaaatgtgtgatatcagggagacattgactaggtggcaatgcatcagagcccaccacattcttgaaaaatcgccgtcttctttc

SEQ ID NO: 449 - DNA, 827 bp, Citrus
aactaccaatattttcgttcatcagatatgcttttattgaattcgacatgaaaatcacactcaataaaaagtctgcataggtattcaattattcatacatgataaatagagtttcaagtcttcatacaacgagcactactattatctatccagttacttgacatacttggcaaaccactccagcaagttttgatgggcttcctctgcagccttcacagcagattcatcttctacattatatctcactgtccatccgtgagccactttaggaaatattttcacaaagcgatcaacctgacaagaaccaaatggaaaagtcattcaagctgcattcaacaaggtaaaataatggcagtagtagaatgattgaaacttgaatgccaatctgatacaaatacacggctaagaaagacaaggaaaattaaggatatgaaaagcaatttgatggctgccccatagagaggaaaggcaaaaggcaatttcatgttgctgaatgctgaccccaagtatttggaataaggttttgggatgagtttcaaattagaccactgaaatggtaattggaaatcctattcaatcaaaaataatttagagacacgacatcatcacatgatcactaacccattactcagtcaatatccacgtgtttatgtcaccaaccagaataaatacctgatgtctcattcattccggatgaatttttattcgctatgtgtggaaacaaaaacagaagaaggcaagtgcaacagaatgatataacattgcttcgaaactgaagatgcctgctagtagttaaatggaaaaaaaagcaaaagatcacaaaacag

SEQ ID NO: 450 - DNA, 737 bp, Citrus
ttcgggcgtgtaagcatgaagatcaagctcgttcctggagactctgctggaactgtcactgcattttatatgaattccaacaccgaaaatgtgagagacgagcttgattttgagttcctgggaaaccgaaccggtcagccttacacggtccagaccaatatctatgcaaatggaaaaggcgatagagaacagagagtgaacctctggtttgaccctgctgcagagtttcacctttacactattctctggaaccatcgccatattgtcttctatgtggatgatgtgcctcgaacccagggaactggtgggaggcaaataattatcaagccctcaccgccatggaagcaagaagatacagatgggttcgtctcaaccacatgatctatgattattgcactgataaatcaagatacccagtacccccaccggaatgccttgccggcatataaattcaacccgacaattaattaagcagttggacggtactccatatccgtatcatatcatgtatattacttcacgtacacgtcctttgtattattccctattcgtgtgaaaagacttatacgcatatcaagggaggggaaataaacattgtgtgcatttaaatgtgattatgggagtgggaaatatgtgggttttctgctctgcttgtaccatatataagtctgaatttgatgcacagtcttctgtgccaataaaagctccttcataattgtgaaaaaaaaaaaaaaaaa

SEQ ID NO: 451 - DNA, 757 bp, Citrus
aaagattattcattaattggatcaaagtaaattagggagcatacatataatatagaattaattacaaacgaggatgtcaaccaactaccgaactataaaaatacatcagaaattcccccaaaattatatgtagaataagtagagcattgaaacccaaaaacagctaccataataaaattaattagttctctaatcctcttcattaaccaccaattataaatgaaacccatctgcattgcctcttgagccatcatcagtatccagttggaaattcacacaccccatatcctgcaaaagaagacgacaaaacaaatcttagcaaagatgaattattatttattcacagcaactatctttgacttaaatgatgccgcgtcatcaaaagaattcattcagtaacttttttttttcacttttttaccgattcctgtgactcgttcgggcgcaagttagcaagtgaattaattaactattgtgcgccgagagagagcaattaaaataaaatttaataaaaagatttaagactgatagaagacggaacacgtactcggtggctccgtaacaacgtaggccgccccgccgaaataacaactgccaccggcgcgagattgcttctggtagtagctgttaaacgcgaacgaagcatgggcctcaatagtgttaggattgtaacatgtggcaccccgttggattggacggcagtcagctcctccctcaccgcaagcgtaatccaagcccctctgcagcttctctttcc

SEQ ID NO: 452 - DNA, 459 bp, Citrus
aatattatatttattggacccatgagggtgtccccccaaacaaacaaaaaagatgcccaaaaataaaaatcatccccgaattcaatacataaaggtaaagccaaaacaccgcattcctcaacaatgataaaatgaatacgcgatgaactatacacatacatacccaccaccaaccattccaataaaccttcctaccaccctcaataaaatctgtgctatctgatatctccttgtctgtctctatacacaaaaataccagaacccctcttccgtaaatcaaactcaaaggatattagaagacaagagatgaccaattagtgctcctgcaggtagtcctcctcaaacgacattggccttggttccccttgatcggattcgggggggacgtttcccgcgatggcgcccccctcccccgaatggaactggatcgtgtactttaaggcgctctgcctcaagggg

SEQ ID NO: 453 - DNA, 735 bp, Citrus
tttttttttacaaataaacctggtggtgttatcataaacagagaaatcagaactcttggtttctcagaatcataaacgagaacagtagacgctggaagatatgtgcaaatcatatataatctgatttcaactacgaaaatagagtagtctttaccatcaatatcatacaaaacttgggaggccgaattgctgcacatcagctacatacatccgttgggatatatttttcaagaataatatttcagaagagtactttctcccccatttcacaggttcttcagtgtcaaaagcgttggaagcaaagtcattaaaaggaaacttggcacccaagcaatggcttcatttcgtgttgaagacgaaggagttgatgagattgctgttgtattggttgctgcagttttgtttgcaccagcggtcatgtacacacaattatcatagcttggatttttgtcaactttgaccccatttccgccaaaactgcaagctatgtcagtagctccattctgctggtaataactgttaattgcaaacgatgcatgagagagtagagtgtctggttcataacaaggctggctaggctgaatagcagaacagtccacattcccaggaccgcatgcccaatctaaggcattctgcaaatcggcttcagaagccttggtggaagctatgcaccatgttgtagttgttccattcaggctggtgacatttgaatctgtcatatcaacaacacccttt

SEQ ID NO: 454 - DNA, 840 bp, Citrus
  misc_feature (12)..(12): n is a, c, g, or t
tttttttttttntttttgccgaatgacattaacataaagtctgcaacatcataatctgatctgtatccacataaaataatggactaaattcataatcattagattaaatacaataaggatttgatcatattgacaccagagtcaaaccaactaataacaaccgcacccactcagcgtactgtatataaaatttaaatacaagggagaaaaattaatgttccaatcgtcgtctaaatctatcagaaaaaataatcaccaatcgtaagccgcgagaaagctccaaatctgcagagcacaaatcagctaatgctcccccctatcttttcccactcaatagccagttgggaactggcattttccatatttaggagcctgcgtgaccacgtaggccgcaccaccaaaatcacaagatccagccttacgcacttgcttctgataataactattgaaggcatacgatgcatgggcttctaacgtgttaggatcgtaacacgtggcgccctcttgaatcggacggcaatcagcgcctccctcgccgcaggcataatcaattgcggcttgcaactttttctcaccagcattcgcgttagccacgcaccaagtctgtcccgctgccgagggcgacacgtcaccaccgcctcctccgctcaccggaacttgagtcttgctcttattggctgccggcgttgagcttgagttcccactagttgacacaaacggcgagtcgtacaccgtctgctcgttgggataaaacaacccgtaattcctttccgatgtgggacccggtttttgattctcattgaacaaagcgaagaggtaaacgttaagtgggtcatttgg

SEQ ID NO: 455 - DNA, 735 bp, Citrus
tttttttttttttttttaagataacaaacttacaactggaattgcgagaacctaactttttatccaccatctcattcacattattcttaaaattttacacaaaataatgcccgttaaactgattacggaaacctataaaaggaaaataatcaaaatctgttagtaactcgaatgtgaggtcctttgttacatcggatggtacagcttcaaagagcttaagagatacaagaaaaccgtttgactggagcagcttcttaactgcatatatcttttgaaccgaagccactgcactctttagcaatactgcacagacaggctccaacattggacataacctcagctaatcatgctgcagctatccaagacttcaagagccaaaatctcttacagctggggtcgcattaacttgatctgtcaccgatggtaattgaaacatacgcacttgatccgtatctgatgaaacagaatttgcttgatctgtttctaaggaggcagaattgctgtgatctgcagcaaaagtagtggaacccatttgatcagttgccgatggggcacagtccaattgatcagtttgtgttggggcagagtccagttgatcagtttgtgatggggcagagtctattctatcagacgctagtgcggtaacatccatttgatcagttgctagtggaccagtgtccatctgatcagtttttggtgggtctgtgtccatcttatcagctgctggtgggtcag

SEQ ID NO: 456 - DNA, 771 bp, Citrus
tttttttttttttttaaattaagctttccaaaaccgtaaccattgacattattgttcacgaaatttgccctcatgcacccatacaaggtggtgatacaaactcttattcactagtacatatggtagaatttattccattataaatattacctcgaatcctgttggtgcatgcagctgccttagcttggttaattaattaaaattaatctggtatctaggctgcctagttggagcaaaaagtccccaatgcctctcaatctcaggtccctttttgccattctcatcaaacatagcaaatatgtaagtctcaataggccttccaggcctctttggtgaccctctcttcacatgttgtatcaagttattattataagtccttgcattatcaacattcgtcaacgctccgtcaccaccagccgtcggccacccactctctgatatcacgatgcccagcgaccccccgccggttttctccagcgcggcgtaaacagcatccaagatggcgtcaaagagacttcggtaacttaacgatccgtcggaaacgaccgtctgttgtgacctaaatagtgcataatccagagatatttggcggttaccagcaattgcgaagtaagggtacaggttgacaagcaagggggatctgttttcgttgaggaagcgaatgaggggatcaagaatgggtctgtaatcttgtttaaatgagcctcttgacggagggaaagattcgccaagagctccagtttcgatggcagtggaaaccttgatttggtt

SEQ ID NO: 457 - DNA, 780 bp, Citrus
tataagccaaattaattatcatataaaatataattaaatgtataaacataagatctatataaatattgctctgtgatattacaagctacttatgatgtaaagctttgaaagcttgaaatacatagcaggttctagccactgaagccaatgatgctaataacatcatgaaattatggaggatgataagccatcattgtggtctcatttcttacaagtgcaatacccaaccgaaagtttattcgtctctcttgacatacttggttaaccaatttatcatgtcttcatgtgcctcttctgcactcttgacggcaaattcgtcttcaacattgtacctcaccgtccatccatgagatacacgagggtatattttcacaaggcagtcattcttcagttttgcagataatatttctccaaaacgtttcagatcttctggtggggaaacgtgatcaatctcagctcccaaaatagcaactggaactttaatctcatttatatcatcgactgtgatggcaccaggatgcaacacaactgcagcctgaatatcatgagaacttgccaattttgcagctacaacgcctccccagcaaaaacctgctgcccctatggcagatacacctttacttttcaaagcagcaattactgatttggcatctacataacctttgtccgtgttatgaatttttctccaggcctctcgatcaaactgagggttgttcagatcaacaatagggtcgccataaaagaaatcaggagccacaactaagaatccagcaccggcaa

SEQ ID NO: 458 - DNA, 591 bp, Citrus
tttttttttttttttttccttttccaacccgaaggggactgttaaaaattatgtggaatttttttttcgaacaacttcaaatttctcatgtttttaaaaaaaacaagattggtatcatacatatacaatatttttttcccaaattacaaacaaaagtcaaattcctagataccccaactctttaatgcttgatgtccacaatatgctggttcccgctcatatttgcataatcttttcccccaaggggattcatgttccaaaaactactactgcagcaaaatcatctgaccatttgtcccccaacattttccaaatgaaaaacatcgggtttcccaaagggtctcatggtttccagggtgcccgaggtgggggaggaattggaaacattgggggaacccccaaaaaaatggggttcttgtcaatgggggttctgcccttttcccccgacaaaaccccaagtgctgcaactaaacctgcattgcccgccaaagttggttctgtataaatggaattgggaccaacatcccggaaaccatcgtgcttgtcaggaccagcaaccaaggctcccacaagtgtatttgggtttggctt

SEQ ID NO: 459 - DNA, 802 bp, Citrus
tttttttcgaatcacagttccatcttattgcttagatatttcaagaaagccgtctagagcaagcatacagaagaagcctgagacagtgacatccctaaacaagaaagcaaatcagattacaccattcaaaaatttattacaacagactgaaattgctaagatacaattggtaggaacagcaaccaaccaccacacagtgaaatccgattgatgaaaagacattgtaaatggaagaacaaaatcccaagaaacatcagaacaactcaaatacgccactcaccaaatcaagaatcacaagggcactccaccgcagtggcaacaggcacatgaatgtctttgtagaggcaaacataaggtgcatcacagcccacgtagggcccacaccacctggccttatcaatgtggctagcatcccaaactgaagcatacaaaaacattggtttattgggaaacccctcaccctcgttcctctcagctctcctcaccaccttcccatcaatcaaccactggatcaaatctggaccccacttgatcacgtactcatgaaatccttcagaacaatcgaaccccagatcatgaatctcctctctattcccggttcctgtagtgtaataattggtttgaacgatagtcttgtccttgccaaggaattcaaagtcgatttcgtcttgggatttgtcgccttctagagaagaaaggtagatgttgaagttgaggccactagtgttgcctttggggcactggatcagggagctgaaggtgccgtaaaggaagcgagtggtggagcgccacctggctccgc

SEQ ID NO: 460 - DNA, 613 bp, Citrus
gggccccctttttttttccataaactttctattgccatgcatcccgaatagggtttgataaaaaatacatataagaataagcagcaacaatatgtatgaagaacgcaagtaaaatggatacatacactctcccatgccctgtttcaatacctctgataaatataaatggtaaaggcatactaagatacttggtacacacacagagcgaatctcagattgacgcttaaatgtcacggtctcgtttgcattctggtgaaggcgtagggaagcgggcacgatcgttgcagtagttatagatggtgtatttctggcgaacccatctgagtctcctgtactggtaggcgtcaaggtcttggaacgccttctgatcccaccatctcttgccctgtgtctcacagaacttggcgttcacagatacctcacacccatcaacgtggaaccccttgtaggaggctatgaaaggagccttcgaccagtccgtcttctccaaaccgcccctcgttgcccagtcatctgcattccacaggcttgagtatatcttcatgggttggttgaatggaaacctcactcccaaatctttgctgttcttgaacactctaatcggcacatcctc

SEQ ID NO: 461 - DNA, 738 bp, Citrus
ttttttcataaccatcaaatagaataacggtgacaaaagaattaattcacattttcatactcgtgatcccgaaatttaaaatgaagaagaggaaattaaaaaaaaaaaaatgaagatgaatcgcctttcgccaggggtgggtcatctgtcaatcccatggactcaatgaacactcgacgggcaaggttggaaatctttcagtatccttgcaataatcataaataacaaggtttctcagaacccaagcatggtccagtttctgagaatcagagagatgccaggcatcgtattgatcccaccaattcttagtggttgttgatacgcattcagggtagggatcttcccattggcatccatcaacactgaaatccttgtaagatgaaacaaacggagccttcttccagtcagtcttttccaggccccctcgcgttgcccattcatccgcattccatatgctggaaaataagtacattggcttctcattcgggaagaaatcgtttgctttcccattgtttttgaacactcttattgggaccctgtcaacaaaaaacacaatctggtggttgttccataaaatggaataagtatggtaatcttgagttgggtcaaaccaaagcatgtgcctcatctctctgttaccagtcccattcttataaatattcgtttgtataagatatggctgccctgttctattccccaagaactcaaaatccaattcatctcttgttggccctgccc

SEQ ID NO: 462 - DNA, 843 bp, Citrus
  misc_feature (812)..(814): n is a, c, g, or t
ggggaactcgcacacacataaataccaacccttataagctgctttctggaaactctctctttattgattgcagtactatggcttactcgaaaaattttaccctgctcatctctatagcaatcagcactttgatggttgcttctgctagtaatttctaccaagactttgatatcacttggggagatggccgtggtaagatactcaacaacggccagcttctctccctctcccttgacaaagcctcaggctcaggcttccagtccaagagcgagtacctttttggcaaaatcgacatgcaactcaagcttgtccctggcaattctgccggcacagtcaccgcctactacttaaaatcaccaggatcaacatgggatgagatagacttcgaattcttggggaatttaagtggtgatccttatactcttcatactaatgtgttcacaaatggcaaaggtgacagagagcaacaattccacctctggtttgaccccactgctgactttcacacctattccgttctctggaatccccaacgtattgtcttctatgttgatggctcgccaattagagagttcaagaacttggaatcaaacggcgtactctttcccaaaaaccagccgatgaggatttactcgagtctctggaacgccgatgactgggccacgagaggtggccttatcaaaactgactggacccaagctcccttcactgcttcttacagaaacttcaatgccaatgcttgcgtctggtctaatggaaaatcctcttgcaactcaaaaaataataatccatggttctcgcaagaacttgannncactggccgagagagactcaaatgggtgc

SEQ ID NO: 463 - DNA, 313 bp, Citrus
ggggaaaatgcgttgccacgttatgatgaatacgctcacgagcagatcttgcgagcagcatcacttgatgtagacaaacagatgtgtgcattcacgtacttgaggatgaacccacatttattccaacccgataattggagacagtttgtagcatttgtgaagaagatgaatgaagggaaggatgttcaccggtgttgggagcaagcacacgatatcagaagactttccattcaaaaaaactaaagaacgttgagcaaaaaaaaaaaaaaaactaaagaacggaaaaaaaaaaaaaaaaaaaaaaaaaaaaaaa

SEQ ID NO: 464 - DNA, 898 bp, Citrus
  misc_feature (852)..(856): n is a, c, g, or t
gggggtcacaaggttttcaaacaaacagcttctctctcttgttgtgttataactcatacagcaaattaagaactatgggttatcattattcttgtaatgggttgttgttattggtgagtgttttgatggttgttgcctcatcagctgtgggtagcttctatcaagactttgatttaacatggggtgataagagagctaagattttcaatggcggccaacttctttctctgtctctagacagagtttctggctctggttttcagtccaagagagactacttatttggcagaattgatatgcagctcaagcttgttgctggtgactctgctggcactgtcactgcctactatctgtcttcgcaagggccgactcatgatgagattgattttgagttcttgggaaatgtgagcggtcagccttacattcttcacacaaatatattcgctcagggtaaaggcaaccgggagcaacaattctatctctggtttgatcccacaagaaacttccacacttactccgtcatctggaagccccaacacgtcatcttcttggtagataacattcccattagagtgttcaaaaatgctgaatctcttggagttcccttccctaaaaaccaaccaatgaagatttactcaagtctttggaatgctgatgactgggctacaagaggagggttggtgaaaactgactggactaaggctcctttcacagcatattaccgtaacttcagagccattccctgtaacaactgtggctctaaatggtcatcaagctcctcagtttcggatgctcagcgtcaatggcaggctagagacgagcttgatgccacaagcagaagaagactcagannnnntcagaaatatttcatgatttataactattgcactgatttaaa

SEQ ID NO: 465 - DNA, 818 bp, Citrus
  misc_feature (30)..(32): n is a, c, g, or t
  misc_feature (671)..(671): n is a, c, g, or t
  misc_feature (700)..(702): n is a, c, g, or t
gcggggaccacattaccaaacctaaattcnnnaacaattctctctttaacttcttttccaatcttttccctcctttttgaaccttaattcctctcttgttgcttgcaccttcccacactccatgtttcttcctttcgctctagattgcacttgtctttcaaaatatatttgtataattcacaaagagggtgcaaaatcttcttctttctacaatatcattcatattttaatttctttagttgatgatatcttggcctctctctctatctttctttcttttgaacttgagaagcaggtagaactgagattggagaattatttatattaacactgaagaagctgcaaaaagctgcaaaacaaagctttgatgatcttgacaaatgggaagagcagcaagtttcattcaactattactcctactattttgtctcttcctttgttcaggttcaagtgtcacaagtgcacaacttggcattgaagataaaaatgtacaattaaattcttctatatccactaccaaaagagacattaccacaccaataacaacggtaccaatcataactcccgctactcccacttcatcaataccaattttgaacccaacttcaaccccagaaacaacatccccggcagcaacaaccccgagtttgactccgcccaccacgacgacncctgtatccaccggagcaagctggtgtgnnnctagccaaagtgcatcacataccgcgttacaagttgctttggactatgcttgtgggtatggtgctgattgctcagcaattcagcccggtggaagttgttacaatcccaacgccctt

SEQ ID NO: 466 - DNA, 910 bp, Citrus
gggggtgcgttggagcatgacacggtttccaaaaattgctgtcctgtcaatagctttgcctgtcttattcatacttgttttgatttgcagagatagagggttgaatccgttcattggtgctgaagacgacttatctaagcttatcagagaggatgaacccaccagtgaggatgaaatcaatggtgagaatcaactcagcagtgacaaacttcttggtgggcttcttgcaccaaacttcacgaaaagagattgcttaagcaggtaccaatccatctcatatcgaaaatcttcgccgtatgtgccttctttgtaccttgtttccaagctacgagaatatgaaaagcttcataatagatgcggacctgacacagagtcatacaagaacagcataaaagacatggtatctggtcaaaatgacagttcctccgagtgtagatacgttgtttggatagccagagccggcctgggaaacagaatattgagcatagcatcagcttttctttatgctcttcttacaaaccgagttctgctcattgatgaagaacctgaaatggccaatctgttctgtgagccatttccaaatgcaacatggttgttgccaaaggactttcccttcatgtatcgaatctcccgtttcaaacagaattatgcaaagagttacgggaatatgcttaagaagaataagataaatgcttcgacagatctgctgccaacacacctttatctctacctgtgtaatgattatgatcatcatgacaagctgtttttctgtgatcaagatcaaactattctcaggaacataccgtggttgataatgaagtcaaatctctactttcttccatctcttttcctgatgtcatcttttgaggaggagctagacaagctatttcctgacaaagaaatggttttc

SEQ ID NO: 467 - DNA, 860 bp, Citrus
ggggacagatcagcatttcaaagtagaagcttcaacttccctccacttcactgggcctgctctgctcattcgcttacttcctctccccgttcttctgtcttcattcttcaatggttaaaatgtctttgattttcagtctgtttgtgggtcttttaatggtaggtttggtcagctcagctaagtttgatgacctttatcaaacaagctgggcatttaatcatgttcagtatgatggggacactctcaagcttaacctcgataattattccggagctgggtttgcgtcaaagagcaagtatttgtttgggaaagtctccatccaaattaaacttgtagggggtgactctgctggaactgtcactgccttctatatgtcatcagacggtccaaatcacaacgagtccgattttgtgttcctggggaacactacaggagagccatacttagtccaaaccaatgtttatgtgaatggtgtgggcaacagagagcagagacttgacctctggttcgacccaacaaaggaatttcatacctattccctcctttggaaccagcgccaagttgtatttttggtggatgagaccccaattagagtgcacactaacttggagcacaaaggaattcccttcccaaaggaccaagccatgggtgtgtacagttcaatatggaatgctgatgactgggccacacaggggggaagggtcaagacggactggagccatgcaccttttgttgcatcatacaagggctttgaaattgatgcatgtgagtgcccagcgtcggttgcaggtgccgacaatgccaaaaaatgcagcagcagtgctgagaaaaggttctggtgggatgagccaacattgtct

SEQ ID NO: 468 - DNA, 401 bp, Citrus
ctcggccattgctacgaccaccatcaacggtgtgaagtggaagctgtacaagggacctaatggatccatgactgtttacagcttcgtcgccgagtccaccgtgactagcttctctggtgacatgcttgccttcttcacttacttgatcaacaaccagggtcttagctctagcttgtatctgattgatgtccaggctggtacggagcccttcactggttctgccaagctgactacatcttcttactcggtcgttgttgcgtaaatgcgagatcgaggaagttgatcgttaaggcgatgggatggaagttgaacaagaacggaggttgattctcgtaaagattcttttctatcgaaatgaattttgagatttgttccgcaaaaaaaaaaaaaaaaaaaaaaaa

SEQ ID NO: 469 - DNA, 810 bp, Citrus
ttttttttttttttgggtaacgcgacaacaagatcgacaatgccaagtcagttggccatcttatgcaaaatgcctattttggctgctaagctaccaacaatatgattagtattacaagaacacctgctgaataaactatccaagaatgagaaatatataaagctactgagtgattcaagtactattgaacagcttaattccccaatgaatatcctcacagtgcctcaaatatggcacaattgtagcagtatccacttcacgttttgccttgcagtcataaattggaggagaatgaaaacaaggctccagcgacacggcccgcccacagaccggatttgggatcttattatcctctattttgtacagaatcaatggttttttacctgcaagaccttgtgccacatagccgaaggttgaccgtgcgcttgtgactaaaacatccatcatacttaaaagattaatttcggccaatgccttctggttgtgtacattattcgtggaccgttgcttctcttcatgactgggctgataaacattaatcacttcaccgttcaaagttggatgcttgaggtacatatccttcagcttctcgtagtaagaagggatcaaggatgttagaagaacagccttggatttccctttcccagatggagcaactatcgattttcccatatccacttgaggtaacagtttttccttaaaagtgcaggtcaaaatttgatccataacttgctgaaaaggactagttttcttatcaaatatccttatttggatgccaattcgctcttcggcttcaaccaggtatttctt

SEQ ID NO: 470 - DNA, 834 bp, Citrus
tttttttttttttttttattcaaaattgaaagaggcagtgatatacaattaaataccgtaaccatgacattattgataatgaaatttggcctcgtgcaccgatgcaaggtgatgatgcaaactcttgattactaatacatattgtgcaataatttattccattagaaatttaacttcaaatctgctgccgcatgcagctactctgatttggttaattaattaaaattaacttggtatttagtctgcttatctggagaaaaaagtccccaatgcctctcaatctcatctccctttttatccttctcatcaaacatagcaaaaatgtaagtctcaataggccttggcttctttggtgatccttgcttcacatgctgtatcaagttattattataagtccttgcattatcgacattcgttaacgctccgtcaccacctgccgtcggccacccactctccgatatcacaatatccaacgagcccccaccggctttctccaacgcagcgtaagtagcatccaactgggcatcaaaaagattctggtaactcaacggagggtccgaaacaaccggttgttgggacctaaatagtgcataatcaagagatatttgacggtcaccaacgatggcaaagtaagggtacaagttaacaagcaacggggaattgttttcgttaaggaaggtaatgaggggatcgagaattggtctgtaatcttgattaaaggagccagctgacggcggagaggatttatcaagagctccgaatgcaatggctgtggaaactttgatttggcttccaaggttagctccgttaatggcgttttgtatgtttctcatg

SEQ ID NO: 471 - DNA, 605 bp, Citrus
ttttttttttttttagaatatattcaaacagtttatttcaaccaccctcttgttgttttcaatatagggttacaaataattttaatacctaagaaaaaagagaagaaaagaaagagtttccttgatacattttaatcaaaggaggaaacctttacaattaaagctatatataaaataggaaccattagattcatcacttttatttcgcttaacattccattattcaacatcaactgggaattcgtctggccgtttcaagtacccccactaggatagacacatccattgtaactgggattttgggatgtgagagttgccgtttttgagaagtcgcagttccatggattttttgcagaagtctgatagtagagattcatggcaaaagcagcatgtgatgctactgtatttggttccaaacaggcacctcctggctggataggactgcaatcgatgccttggctgcaggcatagtcaagacttgcctgcagttgtgcatcggagatgccggccttgggcacacaccaaccagctgctgttggttttggtgatggagtcgttggagtttttggagttgatggagtcactggagctgatggagtcctggc

SEQ ID NO: 472 - DNA, 513 bp, Citrus
tttttttttttttttttccggcccttaaagccacgtagtttttgcgaggtacattggtgaaacctttacaactgggggtccatgccgtccatgtcccatttattggttcattaatatcgacacctcttaaatgcataactaaggggatgggaagttgaagttggagcacattgttcgctggaggagtaaccaattgctgaacccaagtctcgaaaaagctatttcaaactgaacaaaattgttgtccaattgatgccctccaataacaattgaagtctttggcgtcacccctccatccacaaaccctaggaaaaacacatcgttgctgacccggacgattgaatttgccccgatgatgctccaaaacactttgctattctgcaaaacgaaatctatttgagggacaaatggtccaaaacgggagcttccaatgtccctggagttaaagcatgccccaaatggcacaactggagccaccctggtgaccttcgttgggatggcatttacaaaagc

SEQ ID NO: 473 - DNA, 634 bp, Citrus
  misc_feature (10)..(10): n is a, c, g, or t
  misc_feature (501)..(501): n is a, c, g, or t
  misc_feature (555)..(555): n is a, c, g, or t
  misc_feature (592)..(592): n is a, c, g, or t
  misc_feature (606)..(606): n is a, c, g, or t
  misc_feature (624)..(624): n is a, c, g, or t
ggcagaaganaaatgtcaggtcctcagtgctgtgcaaatccaccgacattgaatccaaacagtggagcaggtcatgttgagaaacttggtggactcaacgccttatgtcacctggctctcctgattccaagcttgccgttcttctcatttccgacgtttatggttatgaagctccaaacttgaggaagcttgcagacaaggttgcagcagctggattctaccgtggcagttcctgacttctttcatgggggcccatatgtagctgatggtgggagacctatacaagaatggataaaagatcatggtgtggataagggatttgaagaggcaaagctagttgttcaagctcttaagagtaaaggtataactgcaattggggctgcgggcttctgctggggtgctaaagtggttgttcaactagcaaaacgtgagttcatccaagctgctgtgctgttacatccctcttttgtcactgtagatgatatcaaggggggttgaggntcccctttcaattctgggagccgaaattgatcacttgtctccaccagctctcgngaaggaatttgaagaggccttgaatgccaaatctganggtgatcgctttgngaaaatatttcctaaagnggctcacgga

SEQ ID NO: 474 - DNA, 685 bp, Citrus
  misc_feature (666)..(666): n is a, c, g, or t
  misc_feature (677)..(677): n is a, c, g, or t
gcagatattgttgcaatacttagagccaatcaaattgctcacgtacgcctttatgatgctgacagtcacatgctgaaagccctttcaaagagtggaattgaggtaatcgttggtgtacctgaatgaggaagtcttgggtattggagaatctgcatcagctgcagcagcctggattaataaaaatgttgctgcgtacatgcctacaactaatattacagccattgcggttggcagtcaggttcttacctcaatccctaatgctgcctcagttttggtgtcggccatgaataaccttcataaagctctagttgcttcagatctaaatttccaagtcaaaatttcaactccacactccatggatataatcccaaggccattccccccttccaccgctacatttaattctgcatggaactctacaatttatcagattcttcaatttttgaagaatactaaatctttttacatgttaaacgcctatccttattatggttacactaatggaaatggcattttcccaatcgattatgcacttttccgaccaatgccctcagtcaagcaaattgttgacccaaacactctttttcactataacagcatgtttgatgctatggtggatgctacctattattccatagaagctctcaacttttcaggaatccctgncattgtcacanaatctggc

SEQ ID NO: 475 - DNA, 728 bp, Citrus
gccccttatttctcatgtttttaaagaatacaagattggtatcccccttatacaatatttatatcacaaattacaaacaaaagtcaaattcctagatacaccaactcttcaatgcttgatgtccacaatatgctggttccagctcatatttgcataatcttttccaccaaggtgattaatgttccaaaaactactactgcagcaaaatcatcggaccattagtcacacaacatatactaaatgaaaaacatcaagtttccgatagtgtgtctcatggtttccagggtgccggaggtggtggaggagttggaaacattggtggaaccgcagagaaaatggtgttcttgtcgatggtggttctgctcttttcgcctgacaaagccacaagtgctgcaactaaacctgcattgcctgcgagagttggttctgtataattgtaattggtacgaacatcacgaaaaccatcgtgcttgtcaggaccagcaaccaaggctcccacaagtgtatttgggtttggctttgaagagtctctccatttccatcctcctttacaattgtatctgatcttattcttcggtatagaagcgcccctatggtggacatgtttagggtaatgattaccaaaacccacaatgtaactcattttccgaggatttttaccaaggatgtaatcgatctgagtcttggcaaattcccgcaaggtatcagttgaaaaaaaattgggtcca

SEQ ID NO: 476 - DNA, 763 bp, Citrus
tttttttttttttttttcatgacacatactcgtctatcattattcaaaaaaagcgagttacaccagtaactcttgatggttcaaggaaacaaataaacttccttcgtaagcaaaataactagaacattaatttgggagaaaaaaaactaggatacgttttaaatggaacagcagattctatagtacactcacaaattgcaactatgatggtggcggttacaacaacacagatcctgctacaacttacaactcatcttgatgatcaactagcttcagaccccaactcatatcctcacagtgtctcacatgaggaactaaaactcctgggtcaatccccctcttagccttgcaatcataaaagggaggtgcatggaaacaaggctccattgacatggctcgatgacagggtggatcaggagcagtatgattctcaggcttataaaggatccatggccttaatcctcctagactctgagccacatatccgaatgtcgaccatgagcttgtgaccaatacatcagtcaagctcaatagatacatttctgcccatgccttcctgttgtgtgtgcgcttttcagtctgttgatatctttcttgacttggctggtaaatgcctatcacttctcctgtcacagtcggatattcccagtacatgtccctcatcttctcaaagtaaccagagcttaaagatgtcaagattactgatttagatgtctgattcccagactgacggatgatggctttctccttgtcaactttgggg

SEQ ID NO: 477 - DNA, 613 bp, Citrus
tttttttttttttttttcttcaaaaaatttgcttagcaaattcaaaatgcaaaatggaaggcgagttctataatggaaaaaaggaaaagaaaaaaaaaatatgaaaaaaccactgtattaaaagccccaaaaaaagtgtctattatccccaggaaactttatggcagtttctacaatgatcaatcctggagggaacatgcctatctgcagggactaagcatcagttcaacttcaatagctacttcctcaacttcttctctcatgaatgagcaagctcttaactcattcttccatgaattttttgcgaccgcgatcatctccattctttggttttgaaaaaaaaggatccccctcatgagggcctactgaacgctgtccttcatctaacaaagcatatttccagccattctgctccacaaaattatcatattctggaaaaccttcaatggggagcctcctcaaccttgttactctgtcaatgatcgactgtacagcaacatcaaaaaaatccttgaaagtcgccaattttgagcgaggatctgcctatatcccccttggaatgaaattgataacaacccccctcatctccttaatctgctcgggaaaaatttgt

SEQ ID NO: 478 - DNA, 723 bp, Citrus
  misc_feature (17)..(17): n is a, c, g, or t
aaaactggtgcatcaanattcagaacttatatatgcgtacaagacagagcaaaaaacccacatattttcccactcccataatcacatttaaatgcacacaatgtttatttcccctcccttgatatgcgtataagtcttttcacacgaatagggaataatacaaaggacgtgtacgtgaagtaatatacatgatatgatacggatatggagtaccgtccaactgcttaattaattgtcgggttgaatttatatgccggcaaggcattccggggggggtactgggtatcttgatttatcagtgcaataatcataaatcatgtggttgagacaaacccatctgtatcttcttgcttccatggcggggagggcttgataattatttgcctcccaccagttccctgggttcgaggcacagtttgctggtccaggaactgggcagccctcaatatcaaagtctctgtaataagcataaaaaggagctttgctccaatctattttctctagaccacctcttgttgcccagtcatctgcttcccacagcgtcgaatacacccccatgggttggttcattggaaatggagcccttccactgtttttgtaaaccctgatgggcacatcatccacatagaagacaatatggcgatggttccagagaatagtgtaaaggtgaaactctgcagcagggtcaaaccagaggttcactctctgttctctatcgccttt

SEQ ID NO: 479 - DNA, 816 bp, Citrus
tttttttttttttttttagtaaaacatatctggattgttaccatttaagacacagcttttagcttttacactttgcgtatcccctgataccttaaatccagcgttatttatagttacagcagaaactggtgatcataattagaccctaaactagctttatgtagtcgttttcgatcatccatttgagactccagtggttcgcctcacatttttgagcccaatatgcccatccaaatgttgctcgcccatacacgtcaagttgagcatttgcaaatctctggtaatcctgctttgatgcgtcctttacattccattcacatgtccattccccaacaaaagttagagggccattagaagtagtgacggcgccgagatcagaagctcgttggttgttgacataatcgatgttctgttgcacattcaagctattgaaattgctgctgaacagattgtagtaatgcacatcaatgactacgcaactaaggccacttgcaaatgatagtagctccttatgatcagcaggtcccaaacgattggacatgatcacataagcagttgaagtgtatttcctcacagcatcgtaacctgccttgtaataacttttcaaagtgtctaaagcaaccccaggagcaagcggctcattaatcaactcaatggcagcaaggcttggcctactagcatatctcgcagccagaaagtcaattacggcgacagtatctgctatgttagagtctccccattcctggaatccatctcttgtcgcgctgtggtcattgccgttctgcgaacctggggccgcgtgcaaatcaacaatca

SEQ ID NO: 480 - DNA, 782 bp, Citrus
tttttttttttttttttaaattgatatgggtgcccattctcttatgttttccaaagcatggttacatcaatagatcatagaccaaagaatttataatcttattttgatgttaaattagaataaatgaaggggaaaaaagaaaaaatggcaccccaaatcagcaaatcactagtctgataaataagtagatgaatcaatgctacttattcatcaacatcaccgaggggtagatccccaagcatccatgacaaatatctcaaagggtcacacttgggaacttgcaggatccatgacttggatctttaatggtctgtgcagcaagcccattgaagtaacaggtcccaccaagtttcctaaactgagaccaataggagctaaaggcataatttgctttccacaccaacgaatcgggtttagaacagggtttacccggttggatcgggtcacaggttttattcccctgcgagcaggcataaaaaagagccgatgacaatgcagtagtgttggctactttagctgccacgcaccatatcttccccttatacggctcgttattggtcggcttcggcagcggctcgtactccttctccggtgcatttccgctcaaatcaatctcatacacttgcgacccgtttggatataatagcccgaaatgcctctccgtacccgggcccggtttctgattctcgttgtacagagcaaagataaaagaaggcaaaacccatccgggtcgggccggggtgccaatggccggttttgctgtaaactttttgacaatattc

SEQ ID NO: 481 - DNA, 653 bp, Citrus
cccaataaataaaatacacactgaagtaaaaaataccttaagggacaataagcactacactatgcctaccaaaaaaaaaaaattaaaaaccatcagggaaaaacaacatcaagggccaattttaaacccaatggcggaagctatgcctggacataacaatcctcttacagggtttaaattaaaaaaaaaagttgaataaaagctacgacaataatctctacaacggggcacaatcccgttgaaattccccccaccgacttttccaatttcagggcttttccttccacatggggataatcacatgcctcgtaacctgccccccaccgaaaaagcaaagcaaccccacttctagctttatttaccaaaggaattttattaattaattaaaaaatgcacctaggaagttgcctacttgggtcggctgaaatgaggactcctgttttgttgaaatcacaagcatagccatcacccccgttggcctgataaaaggcgttcatggcgtatgctgcgtgggaccccacattgttcggattgaagcagggccccccggcttgtataggcttgcaatccaccccggggccccacacgtaatctatgtttgcctgcagcgctgcatcaaaggggtctgattttggcacgcaccatttcctgcc

SEQ ID NO: 482 - DNA, 822 bp, Citrus
tttttttttttttttttcagttcttatttattttattctattaatcccgtaatacagtaattatatccatcgaagatacatttattcacggctttcatccagggatcataagcattttgctttacatggaaaagatatcaacaggatgccgtaagtgatcagaaaagcctgtggtagtcccaattcaagtactaggaacaagcattacacaatcacggcaattcgacgggtattatgttccatatgtctcgggcatattcctgaatcgttctgtcactgctgaacttggatgaacccgctgtgttcatgatcgacattctcgtccatctcttttgatcgcaatatgcttcatcaaccttctcttggcattccaagtaactagggaaatctttgcccacaaggaaataatctgcccggccaaaaccttcatttccttccagtgatcccattagttcatcatagttgtaagaaccaaaaacaccagatttgacaaatttcttcacttcttcaaaacgtgcgtcgggaacaaatttcccctcagatctttcttttctcaatcctgcaatctcgtgggctctagcaccaaataggaaaaagttctcctctccaacctcttgccgtatttcaacattggcaccatccaaggttccaatcaaaatgcaaccattcattgcaaatttcatgttactggtaccactagcctccatcccggcagtactgatgtgttgtgagagctcacttgcaggtataagcaattcagccacacttacattgtaatcagggacaaaaataaccttcaataagtcacctatttcaggatca

SEQ ID NO: 483 - DNA, 791 bp, Citrus
ggggggaaggtttttacttttattcaagttctcattgtgggtcgccatagctttcgtccaaatgcatggacataaaagctgctgggatagcgagaggatgggtcttttggaaatcaaggccttcataaaatcagtcagtgatatgcaatatgcagatgccatccttgtttcatgggttgataatagaacctctgattgctgtagctgggaaagaatcaagtgcaacgccaccacaggttgggtgatggaactctcactcagtgatgctataagagtcaactctaatgacgtttctgatggatttccaattataaatatgtccttatttgttcctttccaagaactgcacgtacttgaggatgaatccacatttattccaacccgataattggagacagtttgtggcatttgtgaagaagatgaatgaagggaaggatgttcaccggtgtttggagcaagtggagcgcgaagctgagcacttcgtccatgtgacccagccattggtgcaagaggctgccgtggcccttatgcaccaaaaggctatgttttgttttgttacgacatgccttgttgcaagttttctttcaagttagaaaaaatgactaggtccctcattttgctatggctctttttattatgctgtagctttttaaaatgttaagtcacttatatacatatgtattgtttctataaacacgttaaaccagatgtaatgtaataaaacaaatttattcagctatgaaacttcctattataagtaaaaaaaaaaaaaaaaaaaaaaaaaaaaaaaa

SEQ ID NO: 484 - DNA, 390 bp, Citrus
  misc_feature (277)..(277): n is a, c, g, or t
acaaatttcaaaagaaaggatggggtgatttacttatgttggctcaccctttgcatcttaacatgttgtctattgatgattccgatgttagtgttttagaagattttaagtataaaagtatagatggtgatctcgttggtgttgttggtgattcttgggtattgaaacctcactcggtttcggtaacatggcattcaattaatggtaatagagaagaatcgtatgatgaaataatttcagcactttcgaaggatgtcaaggccttaaattcaactcntataactacaaattcatcttacttttatgggaaattaattgctagagcagcaaggttggctttgatagctgaagaggtaagctttcctgatgtcataccggcaataaggaagt

SEQ ID NO: 485 - DNA, 392 bp, Citrus
ttttttttttttttttttttttttttttttgtacgttgttttggacccaagtgttcgcttcggcttgattggaagcgattggctggagcttatcgttgggaaggcctagcatgacttcaatgttggggccacgaagagcttctagagcttctctgtttggatcatagagtctcattcttctgatgttgttttggttgtagagagctatgacatctggttttgatggtaagttgtcaccaagcattccataacaaacacctatctgagcagttgtagtgtctagagtagccactagcaggccaagaagtagcaagacgacggaaaccattggaggggtattgagggaggataagaatttagccagggagaaaaatgcaaatggaaaagtcccc

SEQ ID NO: 486 - DNA, 796 bp, Citrus
tttttttttttttttataataaacaccgcaatccatgactttatcgattacgaaatttggcctcatgcaccgatgcaaggtgatgacacaaactcttatttactaatacgtacatatggtgccataatttattccatcacaaatatatcttcaaatctgctgctgcatgcagctgctctgattaggttaattaattaaaattaacttggtatttaggctgtttgtctggagcaaaaagtccccaatgcctctcaatctcagctccctgtttatccttctcatcaaacatagcaaaaatgtaagtctcaataggcctgccaggtttctttggtgacccttgcttcacatgctgtatcaagttattattataagtccttgcattatcaacattcgttaacgctccgtcaccacccgccgttggccacccactctccgatatcacaatatccaacgagcccccaccggctttctccaacgcagcataagtggcatccaactgggcatcaaaaagattccggtaactcaacggagggtccgaaacaaccggttgttgggaccgaaacagtgcataatcaagagatatttgacggttgccatcaattgcgaagtaagggtacaagttaacaagcaacggggatttgttttcgttgaggaaggtaatgacgggatcaagaattggtctgtaagcttgcttaaaggagcctgctgacggcggagaggatacttcaagagctccgaattcaatggcagtggaaacttttatttggcttccaagattagctccgttaatggcatt

SEQ ID NO: 487 - DNA, 777 bp, Citrus
tttttttttttttttttgactgaaactttaaactgcgggctattttttcaacctatataaattacccttttatcaagcccaaaaaataaaacaacaaaaaagatgccgaatgacattaacataaagtctgcaacatcataatctgatctggatccacataaaataatggactaaattcctgatcattaaaataaatacaataagggtttgatcatattgacactaaaggcaaaccaactggtaacaacccccccccctcagcgtaaaatttaaatacaagggaaaaaaattaatggtccaatcctctaaatctatcaaaaaaaatcatccccaatcgtaagccgcgaccacaaatcagctaatgctccctattttttttcccactcaatagccaggtgggaactggcattttccatatttaggagcctgcgtgaccacgtaggccgccccaccaaaatcacaagatccagccttacgcacttgcttctgataataactattgaagggatacgatgcatgggcttctaacgggttaggatcgtaacacggggcgccctcttgaatcggtcgggaatcagcgcctccctcgccacagggataatcaattgcgggttgcagctttttctcaccagcattcgcgttagccacccaccaagtctgtcccgccgccgagggggacacgttaccacctcctcctccggtcaccggaacttgagtcttgctcttattggctgccggcgttgagcttgagttcccactagttgacacaaacgggga

SEQ ID NO: 488 - DNA, 782 bp, Citrus
gcaccatgcacatatatatataaacatacacacacagagacagagcaaaaacagagagagaagaaaagatggtggtgtcttatgagggttgttttcttctagtattttctcttcttgctgtagttgcttctgggttgtacagaaacctgcctattgtgccttttgatgaagggtatagtcatttgtttgggcatgataatcttgttgttcatagagatggaaaatctgttcatttatctctagatgaaagaacagggtctggatttgtgtcacatgacctctatcttcatggtttcttcagtgcttcaataaagttgcctgctgattatactgccggcgttgttgttgccttctatatgtcaaatggtgacatgtttgagaagaatcatgatgaaatagactttgagttcttgggtaatattagaggcaaaaattggaggattcagactaatatttatggcaatggaagcaccagcatcggaagagaagagagatacaatctctggtttgatccttctgatgatttccatcagtacagtattctctggactgattcccagatcatattttatatagacggtattccaattagggagtttaagagaactgcatctatgggaggagattttcctgctaagccgatgtctttgtacgccacaatctgggatggctctgattgggctacaaatggtggcaaataccgagtgaactacaaatatgctccctatgtgactgaattctctgacttcgtactccacggatgttcatttgatcctattgag

SEQ ID NO: 489 - DNA, 5837 bp, Lycopersicon esculentum
catatacatgtgtttgcttgtttgcaagtggcaacttttgctgtttgaaattttggggaaaagtagttacccattagtgaaaggctgctgtagaaccaaatgcaatgaatctccggccaaggccaccgttcacgcgcggtagtggttatgatgacgcgccgccacggcagcagcagcctcgtgtcgagccattcaacattatacccatcaataatttgttggctgaccatccttctttgagatatccagaagtacgtgctgcttcagctgctctgcgcgacattggggatctccggctgccgccgttcatgccatggcgtgacaccatggaccttatggactggcttgggctcttctttgggttccaagatgataacgtgaagaatcaaagggagaacttggttctccagttggctaactctcaaatgcgccttcaacctccgtctaccgccccggaccgccttcactatggtgttctccggcagttccggcagaagctattgaagaattactcatcttggtgttcatatctggggaagaagtcacaggttcgactgccgagacgtcaaaatccagaaatttctcgtcgtgaactcttgtatgtatgtctgtatttattgatttggggtgaggctgcaaatctccgttttgttcctgaatgtttgtgttatatctatcatcatatggctatggaactaaattacattcttgatggtcacattgatgagaatactggacacccttttgttccttacacttgtaagcagtttggtttccttgataaagttgtcactcccatttacacgacaattaaaggtgaagttgagaggagtagaagtggcactgcccctcattcagcttggaggaattatgatgatattaatgagttcttttggagtaggaagtgttttcggaggctgaaatggccgcttgacttgtcaagtgcttttctggatactactgttggtaggagagttggtaagacggggtttgtggagcagaggaccttctggaatatatttaggagctttgataggttgtgggtgatgttgatactattctttcaggctgctgttattgttgcttggcaaggtacagattttccatggcaagctttggaaaggagggatgtgcaagtgcagttgcttacgatcttcataacttgggctggattgaggtttattcagtcaatccttgatgctggaactcagtatagtttggttaccagggatacaatgtggataggtgtgaggatggtcttgaaaagcgtagttgctgtgacatgggcagtggtgtttggggtgttctatgcaagaatttggatccagaagaattctgataggaggtggtcatttgaggctaatcaaaggatcttcacatttcttaagattgctctggtgtttatcatcccagagttgttagctcttgttcttttcattctcccatggatacgaaatgtgattgaaaacacagactggccaatattttacttactaacatggtggttccacaccaggatttttgtgggtcgcggactcagggaagggcttattaataacataaagtacacactgttttggattgctgtattggcgtccaaatttatcttcagttatttctttcaaataaggccactgcttggtcctacacgggctcttttgaatttgaataatgtgaagtacaagtggcatgagttctttggtagcacgaatgagctagcagctgttttgttgtggattccaattgttcttatttatctagttgacctgcagatctggtacactatctattcttctattgcagggggagcagttggcttgttctcacatataggtgaaattaggaacattaaacagctcagactcagattccagttctttgcaagcgcattgcagttcagtctgatgcccgaaaatcagactgttgatgctaaggacaccctggttcacaagcttcggaatgcaatacatcggattaagttaagatatggactgggacagccatacaagaagattgaatcgagccaggtggacgcaactaggtttgccttaatatggaatgagatcatcataactatgagggaggaagacctcgtgagtgatcacgagctggaactgatggagttgccaccgaactgttgggatattaaggttattcgttggccgtgttttctcttgtgcaacgaattgcttcttgctctcagccatgcgagcgagctggcagatgcacctgatagatgggtttggtttaggatatgcaagaatgagtataggaggtgtgcagtgattgaggcttatgacagcatcaaatacttgctactagagatcataaaacacaacactgaagagcattcaatagtcactgcactttttaatgatattgatggttgcattcattctgaaaagtttactaaagcctacaagatgaccctcttgccacacattcatgaaaagttggtttttcttattgagcttttgctcaggccagagccggatttgcgtgatatggtcggtgtattacaggccttgtatgaggtgtcagttcgggaatttccaagggtgaagaagagaacagaacaactgatgcaggaaggtcttgctccatcaaatccagataccaatcaggggcttctttttgaaaatgcgattgagtttcctgatatccaagatgctttcttctataggcagctgcgccgtttgcagacaattctgacttccagagattcaatgtacaatgttccaaaaaataaggaagcgagacggcgtattgctttcttcagtaactctctttttatgaatatgccaagagctccccaggtagagaagatgatggcctttagcgtcttgaccccttactatgatgaggaagttctgtttggcaaagaaagtcttaggagtccaaatgaagatggagtatccaccatattttatctgcagaagatttacaatgatgagtgggagaatttcatggaacgtatgcgtacagaaggaatgaaggacgagagagagatatggaacaccaaagcaagggagattcgtctctgggcgtcgtacagggggcagactctgtcccgcactgtaagaggcatgatgtactattacaaggctctcaagatgctttcgttccttgattctgcttcagaggttgatataaggcatggctcacaaagaattgtttcacttggttcatcgaaccaaaataatcacttgaatagggatggccctgccatgttacaaacttctcgaaaacttcacagatcgagtagcagtgtcacccttctcttcaaaggacacgagtttggtgctgctttaatgaaattcacttatgtggtgacatgccaggtgtatggttctcagaagacgaagcgtgatccacgtgctgaggagatcctaaatctgatgaaggacaatgaggctctccgaattgcttatgtggatgaggttaacttgggaagaaatgaagtagaatacttttctgttctagtgaagtatgatcaacaactgaagcaagaagtggaaatttatcgcataaagttgcctggtcctctgaaacttggggagggtaagccggagaatcagaaccatgccattatcttcaccagaggtgatgcagttcaaactatagacatgaatcaagacaattactttgaagaggcacttaagatgcggaatctattggaggaattcaaggagaattatggtctaaggaaacccaccattctgggagttcgtgaaaatatctttactggttctgtatcatctcttgcttggttcatgtctgctcaggagacaagttttgtgactctggggcaacgtgttcttgccgatcctctcaaggtacggatgcactatggtcatccagatgtctttgataggttttggttcttgtccagaggtggcatcagcaaggcttccaaggtgattaatataagtgaggatatatttgctggattcaattgtaccttgcgaggtggcaatgttacccaccatgaatacatacaagtgggtaagggaagggatgttggattgaatcagatagccatgtttgaggctaaggttgctagtggtaatggtgaacaagttttgagcagagatgtttacaggttgggtcatagactagatttctttcgcatgctttcattcttctacacaactgttggcttcttcttcaacaacatgatagtggtggtaatggtctatacatttttatgggggcgcctttatcttgcactcagtagtgttgaggattacgccagcaaaaatgccaccagcaacaaagcacttggttcaattttgaatcagcagtttgttatccagcttggtgtgttcactgccctccctatgattgtcgagaactctttggaacatggttttcttccggcagtctgggattttataactatgcaactgcagcttgcctcactatttttcacatactcaatgggaacccgggcgcatttctttggaaggaccattctacatggcggagctaagtatcgagcaactggacgtggttttgttgtgcagcgcaagagctttggtgagaactatcgactgtatgctcgcagccactttgtcaaagcaatcgaacttggagtgattctggttgtttatgcttcacgcagccccttgactaaggatacctttgtgtatatagctatgactatatcaagttggttccttgttgtgtcatggataacatctccctttgtgttcaatccctctgggtttgactggttaaaaactgtgtatgactttgacgatttcatgcattggatttggtacaatcgaggagtttttgtaaaagcagatcaaagttgggagacatggtggtatgaagaacaggaccacttgagaactactggtctctggggaaaattgcttgagattattttagatcttcgttttttcttctttcaatatggaattgtgtatcagttgcacattactggtggtaaaaccagtattggtgtttacttgctgtcttggattattatggtcgccgttgtggcaatttacattgccattgcatatgcaaaggataaatatgccatgaagaggcacatatattatcggctggtgcagttgcttgtcattctagtcacggtattggtgattgttatattgttgaggttcaccctgtttacgctgtttgacttgatcacaagtttgttggcatttattccaactgggtggggcataatccaaattgccctagtgctccggccctttttgcagtctactttggtttggggcactgttgtgtcattggctcggttatatgacatgatgcttgggttaattgttatggctcctttggcatttctatcatggatgcctggttttcaatccatgcagacaaggatattgtttaatgaagctttcagcaggggccttcagatttctcgtatcctcacaggcaaaacttcataatgtgaggaacaagttacttaatttcagaggcatgtgcatctcttttctaggtagattaatgtggttcctgataagctccttcatttttcgtgggctcttggatgaggaattagattttgtgcctcctactcagcctggggtactctcttgtccttagtctaccaagtcgacgaggtttgcaccagtttaactaagcggatgtagagcagttggggcttctcttcttagttctagtcttagtatggatagtagtaggttcaggagtcatggttagatggtacaacaattccaattttgtagtaatgtatatatggccgcatgtaaatggcatacttgcttctgataataacacaactatgcgtattttttatgggctaatggaccacagtggacctttcaccaact

SEQ ID NO: 490 - DNA, 5743 bp, Lycopersicon esculentum
acaaaaggggattttcctttttagatctctccgaatgctacaatgagcctccggcaacgttcaacgccggcggcgagacaagtttctatagatgaagaaccatataacatcattccgattcataatcttctagctgaccatccttctctacgtttccctgaggtacgcgctgcggcggcggctttacgctctgtaggtgacctaaggagacctccatttgcaccgtggaaacctcactatgacctgcttgactggctggcgctgttcttcgggtttcaggattctagtgttcgtaaccaacgggaacatatcgtgcttcatcttgctaatgctcagatgcgtttatctccgccgccggacaatattgactctcttgaccctgctgttctccgtcggttccgacgtcagcttctgaagaattactcgtcgtggtgctcttttctcggtctcaaatctaatgtttggctttccgaccggcataactcatctgaccaccgccgtgagttgctttatgtctcgctttaccttcttatatggggtgagtcagcgaatctacgttttgttcctgaatgtttatgctttatttttcataatatggctatggaattgaataagattttggaggattacattgatgagaatactggtaggccatttttgccatcgatatctggtgaaaatgcttttctgaatcggatcgtaacgccaatttaccaaacaatccgagctgaggctgataatagtcggaatggtactgccccacactctgcgtggcggaattacgatgacatcaatgagtatttctggactaaaaggtgttttgataagttgaagtggcctattgatattgggagtacattttttgtgaccactaacaagggaaagaaggttggaaagacagggtttgtggagcagagatcatttttgaatttgtataggagttttgataagctatggatcatgctggcgttgtttttgcaggctgcaattattgtagcttgggaagggaagccttatccgtggcaggctttggagagtagggaggttcaggtgagggtgttaactatcttcttcacctggagcagtatgagatttctgcagtcgttacttgatgcaggaatgcaatatcgtatcatctctagggagaccccgtggcatggggtgagaatggtgttgaagagtgtggttgcagctgcgtggattgtggtctttggtgcattctatgggaggatttggatccagaggaatagggatgggaaatggagcagtgctgctaacaggagggtagtgaattttcttgaggttgctcttgttttcattgctccagaactgttagccctggcactctttgttctgccatgggtcaggaattttctcgagaacacgaactggaggatattttacctgttgtcctggtggttccagagtcgaacgtttgtgggtcgtggactcagggaaggccttgttgataacattaagtattccctcttttgggtagtagtgctcgcgaccaagttttccttcagttacttcctacagatcaaacctatgatcgttccaacaagagcactgttgcgcctcagggatgtgaagtacgaatggcatgaattctttaaccatagcaacaggttctcagtaggattgctttggcttcctgttgtactgatttatctcatggatattcagatatggtactcaatctactcttcttttgttggggcagcggttggattatttgatcacttgggagagattcgaaacatgccgcagttaaggttgagatttcaattttttgcaagtgcaatgcagtttaatctgatgccagaagagcagttgttgaatgctcaaggaacactaaaaagcaagttcaaggacgccatcctccgtttgaaactcagatatgggtttggtcgaccattcaaaaagcttgaatcaaaccaggtagaggcgaacaaatttgccttgatttggaatgagataattacaactttcagagaagaagatattctgaatgaccgtgaggttgagttgttggagctgccccagaacacatggaatgttagagtgattcgttggccatgtttgctcctctgcaacgaggtgctgcttggtctcagccaggcgaaggagctggtggatgctcctgataagtggctctggcataagatcagcaagtatgagtacagacgatgtgctgttattgaggcttatgacagtacaaggcatttgctgctggaaattgtgaaattgaacagcgaggagcattccatcataacaaccttttttcagcagattgatcagtggattcagctggagaaattcacaaaatactataatctgactgctctgccccagatccgtggaaagttgattgctcttctggatctattacttaagccaaaaaaggatgttgacaagattgtgaatgttctccaggccttatatgaggttgccactcgggattttctgaaagagaagatgactggagatcagctgagagaggaaggtctggctcttcaggcatctgcaactagattgctttttgagaatgtagtttcattgcctgatccagagaatgagacattttatcggcaagctcgccgcttgaacactattcttacatctcgggactctatgagtaatatcccaagaaatcttgaggcgagacgtcgacttgccttctttagcaattctctatttatgaatatgccacatgcgccccaagttgagaagatgatggctttcagtgttttgacaccttactacaatgaagatgtactgtacaacaaggaacaactcagaactgagaatgaagatgggatttctacattatattacttgcagactatttatgctgatgagtgggaaaatttcttgcagcgaatgcgtagagaaggaatggttgatgagaagaaagagttatggactacaaagctaagggatcttcgtctttgggcatcatacagagggcagactcttactcgcacggttagggggatgatgtactactatcgagctctcaaaatgctggcctttctggattctgcttgtgagatggatatcagagaaggatcagtggaacttggttctatgaggcatgatgatagcattggtggtttaagttcagaaagatctcagtcttcgaggaggttgagtagagctgacagttcagtgagtatgttgtttaaaggccacgagtatgggactgctttaatgaaattcacatatgtggtagcttgtcagatatatggggctcagaaggccaaaaaagatccacatgcagaggaaattttgtatctgatgaaaaataatgaagctcttcgtgtagcttatgttgatgaggttcccacaggaagggatgagaaggattattattctgtgcttgtgaagtatgatcaaaaacttgaaagggaagttgagatctatcgagttaagttgcctggtcctttgaagcttggggaggggaaaccagaaaatcaaaatcatgcctttatctttacccgtggtgatgcagttcagactattgacatgaaccaagataattactttgaggaggcactgaaaatgaggaacttgttggaagaattcaaactctactatggtattcgcaaacctacgattcttggagttcgagaacatatatttactggttccgtgtcatcccttgcttggttcatgtcagctcaggaaatgagttttgtaaccctaggacagcgtgtattagccaaccccctgaaaatccgaatgcattatggacatccagatgtatttgacaggttttggtttctaactaggggaggaataagcaaggcatctaaagtgatcaacatcagcgaggacatttttgctggcttcaactgtacattacgaggtggcaatgtcactcaccatgagtatatacaagttggcaaaggaagggatgttgggttgaatcagatatctatgtttgaagccaaggttgccagtggcaatggagaacaagttcttagcagagatgtctataggttgggtcataggctggatttcttcagaatgctttctttcttttatacaactgtaggattcttcttcaatacaatgatgattgtcctcactgtatatgcattcttatggggacgactttacctggcacttagtggggttgagggctctgttgctgcagataccaccgacaacaacagagcacttggtgccatactgaaccagcaatttatcatccagctgggccttttcaccgcattaccaatgattgtggagaactctctcgagcatggttttcttacatctatctgggaatttcttacaatgatgctccaactttcatctgtattttacacattctcaatgggaactcgtgctcattactttggtcgtaccattctccatggtggtgcaaaataccgggcaactgggagaggttttgtcgtgcagcacaagtgttttgctgagaattatcggttatatgctcgtagccattttgtcaaggcaattgaacttggtttgatacttacagtgtatgctgcatacagccctgttgctaaaggaacttttacatatatagcactgactatatcaagttggttcctggtggtgtcatggatcttggggccctttgtgtttaatccttctgggtttgattggctaaagacagtgtatgattttgatgacttcatgaactggatttggtaccgtggtagtgtttttgcgaagtcagaccagagctgggagaaatggtgggaggaggaacaggatcatttaagaacgacaggtctgtggggaaagatactggaaattatcctagacctccgcttcttctttttccagtatggcattgtatatcatctgggtattgctgctggaagcaaaagcattgctgtttacttgctttcatggatttatgtggtggtggctcttggcttttttaatattacagcttatgctcgggaaaaatatgctgcacgggagcacatatactttcgccttgtgcagctccttgctgtactctttttcatagttgtaattgttgctttactgcagttcacagcatttaaatttggtgatctctttgtcagcctgttggcttttgttcctactggttggggcttcatttcaatcgcccaagtgttacgtccctttttgcagaagagtatgatatggggaactgttgtgtctgtggcgcgactatatgagataatgtttgggattattgtcatggtacctgttgcagtactgtcttggttgcctggtttccaaccaatgcagacaaggatcctattcaatgaagcatttagtagaggtctgcggatattccagattgtgacaggaaaaaagcctaagagtgacgtgtgatttgaggatttacaggaacattaagtatgagtgctccatgtagtcaatgtccaatatacatgtggaaattaaggcatgggatgaacattaatgtgaagtagtagatacagtacagagtttgaagaggctaggaggttaaatattgtaggagcttgtattgtgaattatactgtgcacttggattaccattagtttggttgacgagttttcattcatcttttgtaattgttgttgtattcatatgttttattgtcatactagtgcacagatgaggagcattatcttatattattgtagaacccccacagttcatttttgtacggtttttgtagtttctactggggagccacgttcaagtatagtagcaattccttctggtattaaatgattttat

SEQ ID NO: 491 - DNA, 6182 bp, Lycopersicon esculentum
cctccccaaaaactcccttctctcactactagggtttattttgctggttgctcttccacttttcaccttttgctttaacaccattcttgaactaacaattaatgcctcttaaagtgaagatataaaggtgtgaaagttgaatataatggcgtcaagagggggaccggagccgtcgctgcagcggcggattacacggacccaaacgatggggaacattggggagtcgatgattgacagtgaagtggtgccatcgtctctggcggagattgctcctattcttcgtgttgcgaatgaagttgagcccagtaacccccgtgtagcatatctatgtcgattttatgcttttgagaaagctcatcggttagatcccacttcaagtggacgtggtgttcgacaatttaaaacttccctcctgcagcgacttgaaagggaaaatgatccaactttgatcggaagggttaaaaaaagtgatgcacgtgaaatgcagagcttttaccagcattactacaagaagtacattcaagctttgcaaaatgctgctgagaaagcagatcgtgcacaacttaccaaggcataccaaactgcaaatgtactctttgaggttttgaaagcagttaatcagactcaagcagtagaagttgatcgggagattttggaagctcatgataaagttgccgagaagacacagatcttagtcccttataatattcttcctctggatcctgatagtgtaaatcaggcaattatgagatttcctgaggttcaggctgctgtttacgctctccgaaataccagaggtcttccatggcccaaggattacaagaagaagaaagatgaagatattcttgactggcttcaagctatgtttgggtttcagaaagatagtgttgcaaatcaaagggaacatctcattttgctgctagccaatgtacacatacgccagtatccaaagcctgaccaacaacccaagctggatgagcgtgctttgaatgaagtcatgaagaagcttttcaaaaactacaagaaatggtgcaagtacttggacaggaaaagcagtttatggctgccaacgatacaacaggaagtgcagcagcgtaagttattatatatgggattatatcttctcatatggggggaagctgcaaatttaagattcatgccggaatgcctttgctacatttaccatcatatggcatttgaactctatggcatgctagctggcaatgttagtcccatgacaggtgaaaatgttaagccagcttatggaggggaagaggaggctttcttgagaaaagttgttactcctatttatgaagtgattgcacgggaagctgcaagaagcagaagaggaaaagcaaagcattcccagtggaggaactatgatgatctaaatgaatacttttggtcagtggactgcttcagattaggttggcctatgcgtgctgatgctgatttcttttgccttcctgtagatgaagagcaagctgagagaaatggggacaacaaggctttaagtgatcgctggctgggaaaagttaattttgttgagatacgatcatatttgcacatctttaggagctttgacagaatgtggagcttcttcatattgtgtttacaggcaatgataattattgcttggaatggttcgggagacctgagcatggttttcacttcaaatgttttcaagaaagtattgagtgtgtttattacagctgcagttttgaagcttgggcaagccactcttgatgtgatgcttaattggaaagctaggcgaagcatgtcattctatgttaaactgcgatacatattgaaggtcatatctgcagctgcttgggtgatcattttacctgttacatatgcttacacatgggaaaatcctcctccatttgcccaagccattagaaattggtttggcagcaactcagattctccttcgctgtttatactggctgtggtaatctacttgtcacccaatatgcttgctgctctgctctttctttttcccttcgttcgccgattcctagagagatcacactacaaaattgtgatgctgatgatgtggtggtcacagcctcgtctttatgttggtagaggaatgcatgagagcactttctcattgttcaaatacactatgttctgggtacttctaattgcgacaaaactagcattcagtttttatgtggagataaagcctttagtggaaccaacaaaaaaagttatgaatgtccacattaccacttaccagtggcatgaatttttcccccatgcaagcagcaacattggtgttgttatcgctctttgggctccagttatccttgtttatttcatggatgctcagatatggtatgccatattctccacaatattcggtggtatttatggagcatttcgcaggcttggagagattcgaactttaggcatgctgaggtccaggttccagtctttgcccggtgcttttaatgcttgtttgataccagaggagaagagtgagcaacctaaaaagaaaggactaaaagcaacattctctcgaaatttcgccagggtgccatccaacaaggaaaaagaagctgcaaggtttgctcaattgtggaataaaataatcacaagttttagagaggaagatcttattagcaatcgtgagatggatcttttgcttgttccttactgggctgatcgtgagttggatctcgtgcaatggccaccatttttgcttgctagcaagattccaatagcagtggatatggctaaggatagcaacggaaaggaccgtgagctgaaaaagaggattgaggctgacccatatatgtcatctgctgtttgtgagtgctatgcttcatttcgcaatgtgataaaagttttggtttcaggtcgtcgtgagaaggaggttatagagtatatcttctcagaagttgacaagcatattgaggctggtaatttaattagtgagtacaagatgagttctcttcccagcctgtatgatctgtttgttaagctcataaaatacttgctagaaaataggcaggaggacagggatcaagttgtacttctattccaagacatgctggaagttgttacgcgagatataatgatggaagatcaactatcaagcttggtagattccatccatggagccccagggtatgaaggaatgatccctcttgatcagcaatatcagttatttgcttctgctggagctatcaaattcccccctcctgaatcagaagcttggaaagagaagatcaaaagattgtatttgctgcttacagtaaaggagtctgcaatggatgtaccatccaacttagaagctaggaggcgaatatccttcttctccaattcattgttcatggacatgcccacagcaccaaaagtccgcaatatgctttctttctctgtcttgaccccatactacacggaggaggtgcttttctcatcagatgatttggataaacaaaatgaagatggtgtttccattctgttctatttgcagaaaatttatccagatgaatggaacaatttccttgaacgtgcggactgcataagtgaggacgaccttaggtttaaatggtctcctgagttagaagaaaatctccgtcattgggcttcatatagaggacagactttaactaggactgtgagagggatgatgtattaccgcagagctctagagcttcaatctttccttgacatggcccaggatgatgatttgatggaggggtataaggctatcgaattaaatgacgatcagatgaagggagaacggtctctgtgggcacaatgtcaagcagttgctgatatgaaatttacgtatgttgtttcatgccagctatatggtattcacaagcgatctggtgatcaacgtgcacaagatattctgcggcttatgactacgtacccatctatgcgtgttgcttatattgatgaaattgaagaaccaagcaaagataggtccaagaaagttaatccaaaggcctactattccactcttgtcaaagctgctctgccaaattcacattctactgagcctggtcaaaacttggatcaggttatctaccgcataaaacttccaggtcctgctatcttgggtgagggaaagcctgaaaaccagaatcatgctattatattcactcgtggagaggggctgcagactatagatatgaatcaggataactacatggaggaagccttaaaagtgaggaatttgctccaagaatttcttaagaaacatgatggtgtgaggttccctactatacttgggctgagagagcacatatttactggaagtgtttcttctctcgcttggtttatgtcaaatcaagagacaagttttgtgacaataggccagagactgttggcaaaccctctgaaggttcgattccattatggccaccctgatatttttgacagacttttccaccttacaaggggtgggattagcaaagcttctaagattatcaacttaagtgaggacatatttgctggctttaattctacacttcgtgaaggcaatgttactcatcatgagtacattcaagttggtaaagggagggatgtggggcttaatcaaatatctctatttgaagccaaaatagcgaatggcaatggagaacagaccctgagtcgggatttatacaggcttggacatcgtttcgattatttcagaatgttatcatgttatttcactaccatcggtttctatttcagtaccttgattacagttctcaccgtgtatgtgtttctctatggccgcctttaccttgtccttagtggacttgaggaaggactcagcaaagaaccagctattaaaaacaacaagcctcttcaagtggctcttgcttctcagtcgtttgtgcaaattgggtttttgatggccctccctatgatgatggagattgggttggaaaagggattccgcactgcactcagtgaatttatactgatgcaactgcagttggcacctgtattcttcacgttttcacttgggactaagacccattattatggaagaacattactccatggaggtgcaaagtataggcctactggtcgtggttttgtggtctttcatgcgaagtttgctgataactatcgcttctactcccgtagccacttcgtcaagggacttgagctaatgatattattactcgtgtatcaaatttttggtcaagaaaacagaggagctgttgcatatatcttaatcactgtctcaatgtggttcatggtgggaacctggctctttgctcccttcctcttcaacccctctggttttgaatggcaaaagatagttgatgattggactgattggaataagtggataagtaacagaggaggtattggtgtcccccctgagaaaagttgggaatcatggtgggaggaggaacaagaacatcttaggcattctggaatacgcggtattgttgctgaaattttgttgtctttgcgcttctttatctatcagtatgggctcgtctatcacttgaagatcacagtgaaaaatcagagttttctggtttatggtgcatcatggttagtaataattctggtactatttgtcatgaagacaatatctgttggtcgacgaaaattcagcgcaaatctccaactcgtgttccgtcttataaagggattgatattcttaacattcgtcgcaaccctggtgattctgatgacactgctcaagatgactcctgaagacatggttatatgtgttctcgctttcttgccaactggctggggcatgcttctgattgctcaagcattgaaacctgttgttcggagagctggattctggggatcagttcgaactctagctcgtggctatgagattgtgatgggattgcttctgttcactccggttgcttttctggcttggtttccatttgtatccgagtttcaaacacgtatgctgttcaaccaagcattcagtagaggtcttcagatttctcgtattcttggtggtcaacgtaaagatcgttcctctcgaaacaaggactagagtttcttgacatgaatagagctacatcattaacattcatccttcaatgcttgtaattgttgttcattcacattgtaagctgctgcctttgtaattatctagtggtgatagcagcatttttgggcaaataccatatcactttttttttttggtgaaaattccttaatggaatcattctcttacatttttt

SEQ ID NO: 492 - DNA, 6279 bp, Lycopersicon esculentum
attcacccacaaatatctcattatttacacaattagtcctttttccattttcctccatttttcttcagctcaaaattttttctagggtttaatctctgcttctccggtgattctccggcgagatctccaatcaggagatgtctcgagtggaagatttatgggaacggttggtgcgagcagcactgcgtggtcatagggctgccgctgggagatcggcaggagggattgctgcgaatgtcccatcctcgcttgcgaataacagggatatagatgacattctaagagctgcggacgagattcaagatgaggcccctaatgtgtccagaatactatgtgagcatgcctattccttggctcaaaatttggatcctaacagtgaggggaggggtgttttgcagttcaagactggtctgatgtctgtaatcaagcaaaagcttgcgaagcgggagggtgggacaattgatagaagccaggatatcactctcttacaagaattctacaaacaataccgagaaaggcataatgtggataaattacgagaggaggaactgaaattgagggaatctggtgtcttcagtggtaatctgggagagttggagcgtaagactgtccaaaggaaaaaggttttagcgactcttaaggttttgggaaatgtccttgaacagttgactaaggaggtttcccctgaagagctaaaacgaatgatggaatcagatgctgctatgactgaggacattgcttacaatattattccccttgataccacttcaactacaaatgctatcgtgtctttcagtgaggtacgtgcagcagtatcagctctgaagtacttcagaggcttaccaaaattgcctggagatttttctttaccatcaacaaggagcatcgatttgtttgattttctgcattactcttttggatttcagcaaggcaatgtttccaatcaacgagaacatattgtccacctcctcgcaaatgagcagacccggcttcgtattcctgaagaacctgaaccgatattggatgaggctgctgtacagaaggtcttctcaaagtcccttgataactatatcaagtggtgcagctatttgggtatcccacctgtgtggagcaatttggatgtagttagcaaggagaagaagttgttattcatttctttgtatttcttaatctggggtgaagccgctaacatccgattcattccagaatgcctgtgctacatatttcatcatatgggaagggagctggaggagttactacgacaacaggttgcacagccggctaagagctgtatgtctgataatggcgtgtcatttcttgatcaagttatatgtcctgtttatgatgccattgcggcggaggctggaaacaatgagaatggccgagcacctcattctgcgtggagaaactatgatgattttaatgagtatttctggtcccgtcattgcttcaagcttagctggccatggcggacaaattcttctttctttctaaagccaacacccagatcaaagaacattcttaaatctggaggtggcaagcgcagaggaaaaacatcctttgttgagcacaggacttttctccatctttatcacagttttcatcgtctttggatgtttcttttcatgttttttcagggattgaccatccttgctttcaataatgagcgactcgattcaaaaacactgagggaagttttgagtcttggacctacgtatgttgtgatgaagtttcttgagagtgttctggatgttatcatgatgtatggtgcatactctacatcaaggcgtttagctgtcagtcggattttccttcgttttgtttggttcagcatagcttctgtcttcatatgtttcctttatgtgaaagcgcttgaagataatagcagccaaaattccaactctactgtcttcagaatttatattgttgttcttgcaatctatgctggagttaagttttttgtcagctttctgctgcggattccagcttgtcatagtttgacaagtcgatgtgacaattggtctgtggtccgtttcatcaagtggatgcaccaggaacactattacgttggtcggggcatgtatgagaaaactattgacttcatcaagtatatggttttttggcttgttgtcctgggagctaaatttgcttttgcctattttctactgattaagccgttggtgaagccaacaagacagatagtggcaatggatattcggcagtactcttggcacgattttgtttctaaaaataaccataatgcactgacagttgcgagcttatgggcaccagtttttattatatacctgtttgatactcatctattttacacggttatatcggctgtatggggctttcttctgggagcacgagatcgcctaggggagataagatcattggatgctgtgcataaacgttttgagaggtttcccgaggcttttatgaatagtcttcatgtgcctcttcgaaccaggtatctccatttattttccccaattaatcatttatgaatgaccaagttaattgattcgcatatgttctcttcattgggtctaaatgcgatatctgtttttaagatgttcctaaaattggttttggagagaaacaaagccgatgctgctcgatttgcacctttctggaatgaaattgtcaagaatttgagggaagaagattacattactaatttggagatggaacagcttttgatgcctaagaattctgggagtctgcccttggttcagtggcctcttttcctcctagctagcaagatatttcttgcaaaagatatagctgtggagagtaaagactcacaagatgagttatgggataggatttcaagggatgattacatgatatatgcggttgaagagtgctattacgccatcaagtttgttcttacatccatattagatgatgaaggaaatgatgaaggaaagaagtgggttgaacgtatatatgaggatattcgtgggagcatatctaaaaggagcattaatgtggacgttgatatgaataagttgccactggtgattcagaaagtaactgcactaatgggaatactgaaaaaggagcatacaccagagcttgaaactggggctgttaaagctattcaagatctgtatgatgttctgcgacttgatgtccttcgcttcaacatgagagaccacattgaaacatggaacactttgtcaaaagcaaggaatgaaggccggttgttctcaaagttaaagtggccaagagatgctgagttgatggaactgattaaaagactttattctctcctaactattaaagaatctgctgccaacatacccaagaatcttgaagctaggcgtcggttagagttcttcaccaattcccttttcatggagatgcctgtaacacgacctgtccgtgagatgctatccttcagcgtgttcaccccatattattcagaaactgttctttacagcatgtcagaactccttaagaaaaatgaagatggaatttctattctgttttacctccagaaaatatacccagatgaatggaaaaactttcttgcacgaataggtcgcgatgagaacatctcagagaaagaacttaatgataatccaaatgacattcttgaacttaggttctgggcttcataccgtgggcaaacattggccagaactgttcgtggaatgatgtactacaggaaagcactaatgcttcaatcgtatttggaagggatgattactggagatactgaagcaggaactacacgaaatgaaattacggatactcaaggatttgacttgtctcctgaatcaagagcacaggcagatctgaaatttacgtatgttgtcacatgccagatatatgggaaacagaaagaagagcaaaaacccgaggctgcagatattgcgttactaatgcaaagaaatgaggctcttcgagttgctttcattgatgaggttgaaactcttaaagaagggaaggtgaataaggaatatatctcaaagctagtaaaggctgacatcaacggcaaagataaggaaatctactcaattaaattgcctggaaatcctaaacttggtgaaggaaaacctgaaaatcaaaatcatgccattgtctttacgcgtggaaatgcagtgcaaacaattgacatgaaccaggataattattttgaagaggctctgaaggtgagaaatcttcttgaggagttcttccaagattatggcgttcatcttcctacaattctcggtgttagggagcatgtgttcactggcagtgtttcttcattggcgtccttcatgtctaaccaagaagctagctttgtgaccatgggccaacgtgttctggcaaatcctttgaaagttcgtatgcactatggacatccagacgtctttgacagaattttccatattactcgaggtggtatcagcaaagcctcacgtgtgattaatatcagtgaagacatctttgcagggtttaattcaacgctacggcagggaaatattactcaccatgagtacatccaggttggtaagggacgagatgttggactcaatcagattgcgttgtttgaaggcaaagttgctggtggtaatggtgaacaagttctaagcagagacgtttacaggcttggccagctctttgatttcttcagaatgttatcgttctactttacaactgttggatattacttctgcacaatgttgacagttcttagtgtttatgcttttctctatggcaaggcatatctggcattatctggcgttggtgcaaccattcaagatagagctaatatattacagaatactgctcttagtgctgctctcaatgcacaattcctttttcagattggtgttttcacagcggttcctatgattctgggtttcattttggaacaaggtttcctaagggctgttgttggttttgtcactatgcagtttcagctttgcactgtcttcttcacgttctcccttggcactaggacacattactttggtcgaaccatcctacatggtggtgcaaagtatcatgcaaccggtaggggattcgtcgttaaacacatcaagtttacagagaattataggctctactcccgcagtcatttcgttaagggcatggaaattgtgcttttgttggtggtatatgctgcttacggctacaacgagggtggtgccttatcctacatacttctcactgttagcagttggtttctggctatttcttggctttttgctccatatttgtttaacccagcaggatttgaatggcagaagacggtagaagacttccgtgattggaccaactggcttctttacagaggtggaattggtgttaaaggagaagaaagttgggaggcttggtgggatgaagaactggctcatattcgaacctttggaggaagggtgatggagaccattcttagtttacgattttttattttccaatacggcattgtctataagttagatgttcaaggaacaaatacatctttaacggtgtatggtttttcatgggtagcatttgctgtcatcttactcctcttcaaggtgttcactttcagccagaaaatatcagttaatttccagttgctgttgcgttttatccaaggcctatcgtttttgcttgctgttgctggtttagctgctgctgttgtattgaccgaacttactgtgacggatgtctttgcatgcatcttagcattcatacccactggttggggaattctctcaattgctgcagcatggaagcctctaatcaagaaaatggggatgtggaagtctttccgttcagttgctcgtctgtttgacgctggtatgggtgtgctcattttcatcccaatcgcgcttttttcttggttccccttcatttcaacatttcaaacccggcttatgttcaaccaagcgttcagtcgagggctggagatctctcttatccttgctggaaacaatccaaacaccggtttataatctctctgacaagttctaccaaggccaggatctgaaagagaggattcactttccgaaattccaagtgacatgattcctccttcagaagcttcatcttcctctgatcttgtacagagtaagagtagttcatattgttctatcacatttaggagcctttagtagagtactttatgttattagtaattattgtaaaatctggtaatgtacagttttcagatatgtaaaatcataattttgactctacatgatccctcattattattgcactgaacattattgtttgtattaaatcagttggaaaaaaaagagaggaagagtttagatcttattttta

SEQ ID NO: 493 - DNA, 6217 bp, Lycopersicon esculentum
ttgaacttactttagggttctatcaaaaaagataagttgattggttcgtagagccctagggttttgttcttttttttttttgggaagatggcgagggtttacgagaattgggataggcttgtacgagctacgttacggagggagcagctccggcagaccggtcccggacacggaaggacacctagtggtatagcaggttctgttcccgattcgcttcagcggactaccaacattaatgcgattcttcaagcggctgatgagatacaggatgaagatcccaatgtggccagaattttatgtgagcaggcatattcaatggcacaaaatttggatccgaacagcgatggtcgaggtgttcttcaatttaaaactggattaatgtccgtcattaagcaaaaacttgccaaaaaggaagggactcggatagaccgtaatcgtgacatcgaacgcttatgggagttttatcagcaatacaaaaggcggcacaaagtggatgatattcaaagagaggagcaaaaatggcgtgaatctggagcagttagtgctaatataggagagttgggactaagattttttgaaatgagaaaggtattcgctaccttgagggctgtggttgaagtgatggagtatctgagcaaagatgcagctcctgatggtgtgggaaggcttataaaggaggagttgagaaggatcaagaaatctgatgctactttatcaggggaacttgcaccatacaatattgttcctctagaggcagcatcattgaccaatgctattggtttctttccagaggttcagggtgccatatcagcagttaagtacactgagcagttccctcagctacccgctggttttgatattcctggacagcggcatatggatatgtttgatcttttagaatatgcctttggctttcagaaagacaatgtaaggaaccagcgcgagaatgtcatcctcattgttgcaaatgcccagtcacgacttgggatacctgttggggcagatccaaaaatagatgagaaggttatcacagaggtgtttctgaaggtcttggataattacatcaagtggtgtagatacttacgcattcggcttgtgtggaataaattagaagccattaacagggacagaaagctttttcttgtttcactctacttctgcatatggggtgaagctgcaaatgtccgtttccttcctgaatgcatctgctatatattccaccatatggctagagaattagatgcaattttggatcatggagaagccaggccagccccctgttgtttgggcgaggatcagtctgtgtcttttttggaaaaaattattcgtccgatatatgatacaatagtatcggaagctgcaagaaacaataatggaaaagctgcacactcaaagtggcggaattatgatgattttaatgaatatttctggtcacctgcttgctttgagttgggttggccttttaataaggaatcctcattcttgcggaagcctgctaagaaaggcaaaaggactggaaaaagcacgtttgttgagcatcggactttccttcacctgtaccgaagttttcatcgtttgtggatctttttggttgtcatgttccaggcattaacaatcatagccttcagcaatgcgaaaatcaatctggacacttttaagaaactgcttagtgttggccctacatttgctgttatgaatttcatagagagtttcttggatgtaattctcatgtttggggcctacagtactgcaagaggcatggctatatcaaggattgttatcaggtttatctggaccgctgtgagctcagcatttgtaatatatgtctatctgaagcttctacaagaaaggaatacaaacaaagaccctttttatttccgcctttatatcctggttctgggtgtttatgctggcatacgagtagtttttgcgctcctgacaaagctacctgcctgtcacaaactatcagaaatgtctgatcaatctttttttcaattttttaagtggatctatcaggagagatactttgttggccgtggtcttgttgagaaaacaactgattatttacgatattctctctattggttggtgatatttgcttgcaagttcacctttgcttactttcttcagatcaaaccgctggttggaccttctaagctcatataccaaatgccttccctgcagtactcctggcatgattttatatcaaagaacaacaataatattttgacaattgttagcctgtgggctcctgttgtagctatttatctcatggatattcacatatggtacactttattatctgcaattgttggtggtgtaatgggagcgcgggctcgcttaggggagatacgctcaattgagatggtgcataaacgttttgagagctttcctgaagcctttgtgaagaaccttgtgtcacctcagacaaaaaggatacctattgacagacagttatcagagacttctccagagaacaacaaagcatatgcagctctcttttcaccattttggaatgagattattaaaagtttgcgtgaagaggattacgtcagtaacagggagatggatttgctttcaatgcctagcaacacaggaagtctacgacttgtacaatggcctctgtttcttctctgcagtaagatattgctggctattgatttggctttggattgcaaagatacacagagagatttgtggaccagaatatgcaaggatgagtacatggcctatgctgttcaggagtgctattacagtatcgagaaaatcttatactctctgaatgatggagagggaagactttgggttgaaagaatatatcgagaaatcaacaatagcataatggagggttcacttgtcatgaccttgtctctgaagaaacttccagtagtgttatcaagatttacagctttgactggacttttgattcgcaatgaaactcccgaactttcaaagggtgctgccaaagctatgtatgatttgtatgatgttgttactcatgatctgctgtcatctgatttaagggagcagctcgatacttggaatatattagcaagggcaaggaatgagggacgactcttttctagggtggagtggcctagagatcctgaaattaaagaacaggtgaaaaggctgcatttacttcttactgtgaaggattcggctgctaacattcctaagaatctcgaagcaagaagaagattggagttctttacaaattctttgtttatggacatgccacctgcaaagccagttagtgagatgatgcctttctgtgtattcaccccatactatagtgagacagttctatatagttcctctgatctgcgagaagaaaatgaagatggcatatctaccctgttctatcttcagaaaatattcccagatgagtgggagaatttcttggagcggattggtcgaggtgatagtggtgataatgacattcaggaaggctccagtgatgccttggaccttcgattttgggcatcttaccggggccaaactctagctaggacagtgcgtggcatgatgtattacagaagggcattaatgctacaaagttacttggaaaggagatctctaggaggagtggatggtcattctcacacaaactctctcacaagtcaagggttcgaattatcacgagaagcacgggctcaagctgatttgaagtttacttatgtaatttcatgccaaatctatgggcagcaaaaacaacgaaaggctcctgaggctacggatattggtcttttattgcgaaggaatgaagcacttcgtgttgctttcatacacgttgaggagatcacaggggatgatgggaaagtttcaaaggaattctattcgaagcttgttaaagctgatgcacatgggaaagatcaggaaatatattcagttaagcttcctggagatccaaaacttggagaaggcaaaccagaaaaccagaaccattctataatatttacccgtggggaagcagttcaaaccattgatatgaatcaggataactaccttgaggaagcaatgaaagtcagaaatcttctggaggaattccatggtaaacatgggctccggccacccactattcttggtgttagggagcatgtttttactggaagtgtgtcttcgctcgcttggtttatgtccaaccaggaaaccagttttgtcaccttgggccaacgtgttttagcaaagcctctcaaggttcgcatgcactatggacatcccgatatcttcgaccggatctttcatatcacacggggtggcattagtaaagcatcacgtgttatcaacataagtgaagacatctatgccggttttaattccactttaaggcagggtaatattacccaccatgagtatattcaggttggaaagggaagagatgttggtttaaatcaaatagctttatttgaaggcaaggtagctggtggaaacggagagcaggttctgagcagggatgtgtacagaattggccaactttttgatttctttaggatgctctcgttcttcttcaccacagttggttattatgtttgtacaatgatgacagtccttactgtgtatattttcttatatggaagagcatatctggctttctctggactagatgaaggaatatcgaggagagctagatttctgggtaacactgcactaaatgccgctttgaatgctcaattttttgttcagataggaattttcactgcagttcccatgattatgggtttcattcttgaacttggtttgctaaaggctgtcttcagctttattacgatgcagcttcagttttgttctgtcttctttactttttcacttgggaccaggactcactattttggacgtactatccttcacggtggtgcaaagtaccgggcgactggacgaggttttgttgttcgtcacatcaagtttgcggagaactataggctttattccagaagtcattttgttaaagcgttggaagtggctttacttcttatagtgtacttggcttatggttacacgaatggaagcactacttcctttatcttactaactctcagcagttggttccttgtcatttcatggctatttgctccttacatcttcaatccctctggatttgagtggcaaaagaccgttgaggactttgatgattggaccaactggcttatgtacaagggtggagtaggtgtcaagggagacgacagctgggagtcctggtgggatgaagaacagattcatatccagactttgagaggacggatactagagactatattgagtctcagattttttctcttccagtatggcattgtctataaacttcagttgacgggaacagacacttcccttgcgatatatggcttttcttggattgtactggtgggagttgttatgatcttcaagatctttactttcagccctaaaaaatccaccaacttccagctcatgctgcgatttattcaaggagttacagctttgggacttgttgcagctctttgccttgttgtggctcttaccgaactgtctgttgctgatttgtttgctagtgtcctcgcctttattgcaactggttgggctgtcctttgcctggcaatcacatggaagagggttgtgtggagtttgggtctgtgggaatctgtgaaggaatttgctagaatgtatgatgctgggatgggtatcattatttttgctccagtggcaatattatcatggttcccatttgtctctaccttccagtcgcggatactctttaaccaagcattcagtcgtggtctggagatctctctcattcttgctgggaacaaagcaaatgttgaaccctcgacattttagattttagaaaaagggcctatatccatgtagaatttgtatagtttgcaaattggtagactgtatcatatgccttttgtctaattatttcatagttaggagggtactctgagatggcaagtacattaactattttagacatcattttggcatctcaagttccatctgtaagtttgatatgacgtatggacaaattagccctataatgcagtatacatgaagatggggtgaccaaatttattttggttgtatttaggatcatggcaattttgctcctttttttgtatctgtcgtttcttcatagctgtaatgagggttaatactgcatttttgtcacactgcctattcaggaaaggtaaattaattttgtaatcctttagtaattgtacttcagctttatggcttt

SEQ ID NO: 494 - DNA, 6552 bp, Lycopersicon esculentum
ttcacttgtttcttgaatgccaaaatatgtaatcaagtaggtgcctttgttctcattctcattgttttcagtaatggttaaggggtttctatgttatggatggggtcactatctttttgttatgtagggtggttgctgctcagcacagtcttttcaatatctttttgacaggtaaagttaagaggaagttgcaattgagctttgagggctcaaagtaaaatggcttaccagaggaagggatctgatctgcagccgcagaggcgtattctgcggacacagactgctggtaatttaggggagtcaatgatggacagtgaagtagtaccatcatctctaagtgaaattgcacccattcttcgtgttgccaatgaggtcgagcccagcaatcccagggtagcttatctatgtcgattctatgcctttgaaaaagctcacaggttagatccaacatcaagtggacgtggagttcgccagttcaaaacttcccttcttcaacggttagaaaaggaaaatgagacgaccctagctggaaggacaaaaagtgatgctcgtgaaatgcagagtttctaccagcattactataggaagtatattcaggctttgcagaatgctgctgataaagctgatcgcgcacgacttacaaaagcataccaaacagctgctgtgctttttgaggtcttgaaagctgttaacctgacagaagctgtggaagtgtctgacgagattttggaagctcatacaaaggttgccgagaagactgagatactagttccatataatatacttccacttgatcctgatagttcaaatcaagcaattatgagatatcctgagattcaagctactgtcactgctcttcgcaatacaagaggtcttccatggccaaaaaaccataagaagaaagttgatgaagatattctggactggcttcaagctatgtttggttttcagaaagataatgtggcgaatcagcgggagcatctgattctgttgttggctaatgtccacatccgacaatttccaaagcttgatcaacaaccaaagctggatgacctggcacttactgatgttatgaagaaacttttcaaaaactacaaaaaatggtgcaagtatcttggtcgcaagagcagtctttggctgccaactatccagcaagaagtgcaacagcgtaaattactatacatgggtctttatcttcttatatggggagaagctgcaaatttaagattcatgcctgagtgcctatgctatatttatcatcatatggcatttgaactttacggtatgctggctggaagtgttagtcccatgacaggcgaaactataaaacctgcttacggtggttcagatgaggctttcttgaggaaagtagtgactcccatctataacactatagcaaaggaagctaaaaggagcaaagaaaagtcaaaacattctcagtggagaaactatgatgatttgaatgagtatttctggtcagttaattgcttcaggctgggctggccaatgcgcgctgatgctgatttcttccatcttccccctgaagaacaacgggctgatgcaaatgaagcaattaaaaggaaccattggatggggaaaatcaattttgtcgagacccggtcgttttggcacatctttaggagttttgataggatgtggggcttttttattttatgcttacaggcaatgatcattattgcatggaatggatctggcaatctaggttctatttttgaaggagatgtgttcaagagtgtgatgagcattttcattacagccgccatactgaagcttgctcaagcggttctggatataatcatgagctggaaatcgagacacagcatgtcattctatgtcaagctaagatatgtgtttaaagctgttgcagcagcagcatgggtggtagtgttgccagtaacttatgcatatagctggaaaaatcctccagagtttgcacagactattaaaaactggtttgggaatggttcaagttcgccttctctattcatcatagcggttcttttttacctgtcaccaaacatgctatctgcattgctgtttgtgttccctttcatccgccgttttcttgagaggtcagattacaagattgtgagtttggtaatgtggtggtcccagcctcggctttatgttggaagaggcatgcatgaagatgcattttctcttttcaaatacacactactttgggttctcctcctggctgcaaaattggcattcagtttttacgtagagatacaacctcttgtaggtccaacaaaagatatcatgagagttcgcatcggtgtttataaatggcatgaattcttccctcgagcaaaaaacaatatcggtgtcgtgattgcactatgggctcctgttattcttgtctatttcatggacactcagatttggtatgctattttctctaccatttttgggggcatctatggcgcgtttcggcgtcttggagagattcgcacgttgggaatgcttagatcgcggtttcagtcactgccaggagcatttaatgcttgcttgatcccagtggaaaaggatgaaaaacgtaaaaagggacttaaagccacattatctaagaaatttgatgaggtcacttctagtcgaggaaaggaggctgcaaggtttgctcaaatgtggaataaaataatagagagtttcagggaggaggatctgataaataatagggaaaggaacttattgcttgtgccatattgggctgaccctgatctagacctcatccagtggcctccatttctcttagctagcaagcttcctattgcattggatatggctaaagattgcaatggaagagatcgtgagctgaacaaaaggttgaatgccgacagttatatgcacagtgccattcgtgagtgctatgcttcatgtaaaagcattataaatgttttggtcttaggtgaacgtgaacagctggtgatacaggaaattttctcaaaagttgatgaacacatagctgacggtaatctgataaaagagtttaacatgagcgcactacctaccctctacgaacaatttgtgcggcttattgattttttgaaagaaaacaaaaaggaggacaaggatcatgtagttattctcttgcttgatatgttagaagttgtgacccgtgacataatggaagactctgttcctagtttgttagattccacccatggtggctcctatgggatgcatgatggaatgattccaaatgcaaaatatcagctctttggcacccttaattttcctgttacagaaacagaagcatggaaggaaaagattagaaggcttcacatgctgctaactgataaggaatcggccatggatgtgccaaccaatttggaagctagacggcgcatctcgttcttctcaaattcattgtttatggacatgcctcacgcccccaaagttcgcaatatgctttccttttctattttgacaccttacttcaacgaggaggttcttttctcaataaattcactggaaaggccaaatgaagatggtgtttctatactgttttatttgcaaaagatatacccagatgaatgggagaacttccttgaaagggttgattgtctcactgaggacggtcttaggggtaacactagattggaagaagaactccgtctctgggcatcatatagaggccaaacattgactaaaacagtacgaggtatgatgtactatcggcaagctttggaacttcaggcttttcttgatatggcaaaggatgaagagttaatgaaaggctataaggctgctgaatctaatactgatgaacagccaaaaaatgagaggtccttgatgtcacaatgtcaggcagttgcagacatgaaatttacctatgtggtgtcatgccagcaatatggcgttcagaaacggtctgctgatcatcgtgctcaagacattttgagactaatgacaaagtacccttctcttcgagtagcttacattgacgagattgacgaaactggcaaagataaatcaaacaggactggtgataataaggtttattattcagccctcgtgaaggctgtaccaaggtctgtggactcggcagagccagatcagaagttagatcaggttatttatcgaataaaacttcctgggcctgctatattgggagaaggaaagccagagaatcaaaatcatgcgattatatttactcgtggggaaggattgcaaacaatagatatgaaccaggataactacatggaagaagcccttaagatgaggaatttgttgcaagaatttttgaaaaagaatggagtgagaaatccaactattctgggattgcgggagcatattttcactggcagtgtttcttcactagcatggtttatgtcaaatcaggaaaccagctttgttacaattgggcaaagattgttggccaatccattgaaagtacgtttccactatggtcatcctgatgtattcgatagattgtttcatttaacaagaggtggtgtgagcaaggcttccaaagtcatcaacctaagtgaagacatatttgccggttttaattctaccctgcgggggggtaatgttactcaccatgagtacatccaagttggtaaaggaagagatgttggccttaaccaaatttcactgtttgaggcaaagatagctaatggaaatggtgagcagacaatgagtcgtgatgtatacaggcttggacatcgatttgatttcttccgtatgctatcatgcttcttcaccactataggattctactttactaccttgataaccgtcattattgtatatgtatttctttatggtcggctgtatcttgtcgtcagtgggcttgaagaaggattgagttcacacccagctattcgaaataataagcctcttcaagttgctcttgcctctcagtcttttgtgcaaattggcttattgatggcattgcccatgatgatggagataggccttgagaggggcttccgcaatgccttaactgattttgtgctgatgcaactacaacttgctcctgttttctttacattttctcttggaacaaggacccactattatgggagaacattgctccatgggggtgctcaatacagaggcactggtcgtggctttgttgtatttcacgctaaatttgctgaaaactatcgtttgtactcccgaagccattttgtcaagggaattgaactgatgattctacttcttgtgtaccatatatttggtagatcatacagagatatggtggcatatgttcttataaccgcatctatatggttcctggttgttacatggctctttgccccattcttgttcaatccttctggattcgagtggcaaaagattgttgatgactggacagactggaacaaatggataaacaatcgtggtggtatcggtgtatccccagaaaaaagctgggaatcttggtgggagaaagaacatgagcatctttatcattcagggctccgtggcactgtagtggagatattattatcattgcgcttttttatatatcaatacggacttgtatatcacctcacaattttgaacaacgaaacaagtttcctggtttacggtgtgtcttggatcgtcattttcgtgatattagcagtaatgaaggtagcttgtgtatataatatagtttctgcaatttgtccagatgatttgtacaggatacatattttagttcaaaaggagagggtttggaggaaactcaccggcgaacggtcgacgatcatgaaccaatctcagcttctgaaccggagttaccacccttggccaccacctttaccaccacggcccacaatggtaccggaaaaccaacaaactttccaagtgttgcaaaggccttgttttactcccgggagcgtaaaccggagtgattggaaactccaaaacctttacaacttcgattttcagaaaccccaccgtttgaacaaaccccgccggttttttcagaagaagaaacagagagctaattatcgttttacccctttcaccccgcataacacgacatcgttcctaatccgtgcgaaaaattccgggggaattacttctttggtttccccttgtccggtgactccggctgttttaccgacgccgaagttttccccggcgagggagattttagctgatgtagcgaaggaagagtggggtgtagacggttacgggtcgatgaacgggttgatccgggtccgatcacctgaaaacgagccagaagaagaagatgaaggagaaggggttattatatcctggaacagtgatgttgaggaagtggagaagaggttaagccatgacttgagccgttttgagatgatctatgacccaagaaatggtggcttgggtcgagatacgtatgattttggttacagagttgacgatgtggaggaacatattgagagattggaggaggaaaacatggagttgaaggagaaaatgtatgtaatggagagggaattggaggaattgcggaaaaaggttcggtatttggaaggtgaagatgataatggagatggaaacgagtcggataatgaagctggttctgagaaaagtgtaggagattga

SEQ ID NO: 495 - DNA, 7235 bp, Lycopersicon esculentum
atggcagaaattgttctagtagaaccaattcaagaaagtactgctagtaccagcagaagagcttataccacaagcaatgaaagaacctatacaagatcaatcacttacgggcgtgatcatgtgcctgagccctttgatagtgagaagttgccagtgactttgatttcggagattcaaagatttcttcgtgttgctaatcttatcgagtcagaggagcctcgagtggcttatctttgccggtttcatgcatttgaagtagcacataacttggataggaattctaatggccgaggagtacgacagtttaaaactgcgcttcttcaacggcttgaacaggatgaagaagttactctcaggaaaagaaaggaaaggactgatttacgtgaacttagacgtgcttatcgcgagtataaagagttcataatcaaacatggtggggagagtaatctcgaaaatagagaaaggctgactaaagcacgtgtcattgcttcagtattgtttgaagtattggatacagtttccagagcagcaggtgttcaggctttagctgggagtgatcacgatgccaaatctgaactctttgtgtcatataacattcttccacttgatcaaggaggaattcatcacgcgatcatgcaactccctgaggttaaaattgcggttgctgcagttagggatgttcgtgggttgcctttcctggaagattgtcgaaaacaagaaaccaacctggatttgttcaagtggcttcagttttgctttggatttcaaaaagggaatgtggctaaccagagagagcatttaattttattacttgctaacacacatgttcggcagactcagaagcaagtattagtacccaagctaggagatgttgctgttgatgagctgatgaagaagttttttaaaaattatacagattggtgcaaatttttgggacgaaagagcaatattagggtgccatatctgaaacaggaggctcagcagtacaaacttctgtatatagctctttatcttctgatatggggcgaggctgctaatttaaggtttatgccagaatgcttgtgttacatgtttcaccatatggcatatgagctgcacagcatgctaactggtgctataagcatgacaaccggagaaaaggtcatgccagcttaccaaggagattcagaatcttttctcaacaatgtagtgtttccggtgtatgatgtcatatataaggaagctatgaaaaacggaaaagggacagctgatcattcgacatggaggaactatgatgatctgaatgaattcttttggtctccagattgttttcaaataggttggcccatgcgtctggaccatgatttcttttgcacaggaactccaaataatgtcaaagataaaaaagaaaaggtttctgcttctaacgttgaagaaaacaaggatgcaaatgaagatgaagaaatggggatcctagtggatgaagtgcgtgaaccaaagtggctggggaagacaaactttgtagaaattcgctcattttggcagattttcagatgctttgacaggatgtggaccttttttatcctatcacttcaggcaatgataattatggcttctcacgatttggagtcccctctacaagtctttgatgcaacagtactcgaggatgttatgagtatcttcatcacctcagcggttcttaaacttgtaaatgttattcttgatatcatcttttcatggaaagctcgatgtacaatagaccctaatcaaactctgaaacatgtgttgagggtggttgttgctatgatgtggaccatcattcttcctgtatattatgctagctctcgtaaaaaatatacttgttattcaacacaaaatgggagttggcttggagaatggtgctattcttcctatatggttgctgttgcattctatttgatgaccaatgcagttgacatggttctattttttgttcctgtggttggaaaatatatcgagacctccaattaccggatatgcatgttcttatcctggtggactcagcctaagctatatgttgggcgaggaatgcaagaaagccaactctcccttctgaagtataccattttctggctgttcttgttaataagcaaacttatatttagctacacatttgagataaaaccacttatatcacctacaagacagatcatggcaatcggagtaaaaaattacgactggcacgagcttttccctaaagtcaagagcaatgctggagcactagctgctatatgggctccaattgtacttgtatatttcatggatgcacaaatctggtattctgtctactgttcagtctttggcggagtgtatggaatcctccaccatcttggtgagattcggacgttaggaatgctgagaagtagattttactcattacctgaagctttcagtgatcatcttgtcccacccgaagcaaaagattctagaaacaccttaatgaattggctcatccctttgacattccaattccaaaagaactttcatttatcagaaagggaaaagagcaatgttgtgaagtttgctcttgtgtggaaccagatcatcagtagcttccgagaggaagacgtgataagtgacagggagatggatttgatgaaaatacctgtatcaccagaattactctctggtcgagtttattggcccatttttctgttagcagataagcttgcaaatgcattatctattgcacgaaactttgagggaaaggatgaaacgcttttaagaacaataaagaaggatacatacatgtatttggtggtcatggagtgttatgaatcgctgaaatacatactcgaaattcttgttgttggtgaccttgagagaagggttatttctggtatattagacgaaattgacgaaagtattcaaaaatcaacacttctcaaggacttgaagatgagccaactaccagttctatgtgctaagtgtattactttacttcaacttctggtcgagggaaaggaaagccttcataacaaagtcgtattggcaattcaagatatctttgagcttgtgacaaccgatatgatgttaaatgggtcaagaacgttggagtcacttgatgctcacctgtatagtgagaaagaggttgttgaatgtttcgactcgattgaagtaccactgtttgcatctaagaattcaatccattttccattgccagatagtgattccttattggaaaagatcaagaggttccgtttactgcttactgtcaaagataaagccctagatataccgactaacttggaggctcgtaggaggatttgctttttcgctacttctctgtctatgaacatgccaagtgctccaaaggtgcggaacatgttatcattcagtgttctaactccacatttcatggaggaagtcaaattttcaaagaaggagctcaattcaagaaaacaagctggagtctctatccttttctatatgaaaaagatatttccagatgaatgggagaactttttggagcgcatggaaaaggaaggaatagatgaatctagtgatgaaattgaagaagaggagagaagttgggcttctttccgagggcaaactctaagcagaactgtccgagggatgatgtactacagaaaagcactgaagttgcaagcttttctcgacatggctgaggatgaagatatcctccaaggttttgatgcaattgagaggaaaaacgatacattatcagctcaacttgaagccttggcagacatgaagtttatacatgttgtgtcttgtcaaatatatggattacagaagactactggtgaccctcaggctcaagacatactaaatttgatgataaggtacccttctttacgagttgcttatgttgaggagaaagaagaaattacagcagacaagccgcgaaaagtttattcatctattctagttaaagctgttaacggttttgatcaggaagtataccgcgtaaagcttccaggtacaccaaatattggagaaggaaaacctgaaaatcaaaatcattccataattttcacacgcggtgaagctctccaaacaattgacatgaaccaggataattatttagaagaagctttgaaaatacgaaatatcttgcaagagttcctaaaacacagtggtcggcgtcctcctacaatacttggcatgagagaacacatatttacaggaagtgtttcttctttagcttggtttatgtcctatcaagaaaccagttttgtcaccattggccagaggcttctggctaatccactcagggtcaggttccattatgggcacccggatgtgtttgaccgcgtatttcatttgacaagaggtggcattagcaaagcatccaaaacaatcaacttgagtgaagatgtttttgcaggatttaacacgactctgagacgcggacatgtcatatatcttgagtacatgcaagttggaaaaggtcgtgatgtaggccttaatcagatttcaaagtttgaagctaaagttgcaaatggaaacagtgaacaaacaatcagtcgtgatatgtatcgccttggccatagatttgacttctttagaatgctctcatgttattttacaacagttggcttctacttcaacagcctgatatcagtggttacgatttatgtgtttctatacggtcagctctacatggtattaagtggtctacaaagagcactactagttgaggcaaaactacaaaacataaagtcactggaaacagctctagcttctcaatcatttatccagcttggacttttaacagggttaccaatggtcattgagttgggactagagcgcggttatcttaatgctcttaaagattttgttctgatgcaactgcagctggctgcagttttctttactttctcctatggaacaaagtctcattactatggcagaacaattcttcatggaggtgctaagtatagacctactggtcgtaaagttgtggtttttcatgccagcttcactgaaaactatagactttactctcggagtcacttcgtcaaaggatttgaacttctactcctgttgattgtttatgatttgtttagacgatcgtatgagagcaatttggcatatgttttaactacatatgcaatatggttcatgtcatttacttggtcgtttgcaccgtttctgtttaatccttctggatttgattggggcaagatagttgatgactggaaagattggaacaagtggattaatcaacaaggtggtatagggatacaacaagataaaagttggcaatcatggtggaatgatgaacaagctcatcttcgtcatgctgggctattttcgcggttgattgagatactcctttcactgagatttttcctttaccaatatggactggtgtatcaccttgatatatccaatcaaagtaaaaatattgttgtctatgtgctctcatgggttgtcattgcttttattttcctcttgatgaagatgctgaatatcggaaggcggtttttaagcgcaaaccatcacttaactttccggttgtttaaagcttgtctatttctaggagttgtggcaactattattaccctgtctatcatatgtcatctgtctgtgaaagacttgattgtctgctgtctagcttttctaccaactggttggggcttgatattggttggccaagtagtgagaccaaagattgaaggtactggattgtggcacttcactcgagtgtttgctcgagcttatgactatggaatgggtgttgttcttttcgcgcctttagcttcactggcttggcttccaataatttcagctttccaaactcggtttctgttcaatgaggctttcagtaggaggctgcaaattcagccaattcttgcaggaaagaagaaacattagtgatctctatttgactttacattacataacttgcatgtacacatattgttctgttactgtagaatagcaaaatactggtaaaaacatgttgtcgtgcggatatactccatagggaaaacaatcgattgtataattctttcatgtacaggtatagttgtatactagactattgtgcatagacgctaatgaataatacgcattcttaaaatctcaaggttatcatctttcagtagagtgttggtcaaaactgaaaaataagttcgtccaagtgtaacaccaaatatgttttatattacatcgcgtatatcacaattctacatcaagagagaagtctcaataccggagctggctgtggaactgttgtcaacagaaggcgctacaactggaggtgaatcaactgatgaaggttgagactctgcatcagaaatatcagattccacagagctcattctttcggtctctgatgattctacttcctctttagatttccctgatgacttcccagacatcacttcctttatgccaccaccaacagatttgccagcatctttaaggattctcttcgtcttgccccatttgtgaaacttttcccatttcctgcaccgttctcttttccatcttctgtaggtgttgttgctaatgatgaaggcaaaatggtgtcatccactataatcttcactctgatatccttggcattaactgccctaagattcacatgcagagatgaaataggctctccaagattgctagaacttctccggagaactgagctgatcttatgtaaacccctgtgtaaacgacctggggaatcccctaggtaattcaggcttaaaccaacatttacagtgaataagaagataccaaggtcacccacagaactgtaacgcagagcatacatggtaaaagtcaacggacacacggggagcaaaaggggtcaaagattacctcatcaagaaataaaatagaggccttcttcagtagagcccttgcaacagcaattagctgaaaacagaaagatggcgtaatataactctgcaaacttgtgctaatctgattttggcattcaccttttgaatcagcactctctgaaaaatttgagcccttaagctggacatagccttctcccaaatggaattcatgttcaccaaataacatagaatgtaacaaagctgatttatcgaacttaactacttcacttgtaattaatcttagtcatactaaatagagctccaaatacttaattggtgctgccaatagaacaagaaattctaaaatccttcacacaatgaaaaacttttaagtaaacataaatattaagtttattttagataatacaatgccttgaactagttatgtagcttctcaaagtcaat

SEQ ID NO: 496 - DNA, 6430 bp, Lycopersicon esculentum
acaatcattttttcctctctctcgagatctcgagatcacctaaaacttatttcatttctctttgtagtttaatttgatcggtttgttttttttccctcctccttgcctctacttgctcgttattttcaggcagcacaagctcattctcttcttcatcatcgtcaagtttcatccaaattgaagggaagagagggagaaacggaaaggagctggaggagctggaagagaccggtggtgtcgcagccagagctacatttagttagctaagctaccgacagcactgattaggagaggacaaaaaataggatgacgaatccggcgagaccggcggagggaatggaccccccccaaacaccggtcgggggcgcagggccctcgtcactgactaggcgaccgtcacgaagtgccgccaccactaccttctctatggaggtgtttgacaacgaggttgttccctcttctctccagtccattgcaccaatccttcgcgtcgctagagaaatccaaaatgaacgccctcgcgttgcttatctttgtcggttctatgcgtttgagaaggcgcatagattggatcccacctcaggtggacgtggtgttcggcaattcaaaaccaatctcttccaacgtttagagcgtgacaacgcgtcgagtcttgcttctcgtgtgaaaaagactgatgcacgggaaattgagagcttttacaagcaatactatgagcagtatgtcgtgtctcttaacaagggagaacaagcagacagagctcagctcggtaaagcatatcagacagctggggtgctttttgaagttctttgtgcagttaataagtctgaaaaagttgaagaagttgctcctgagatcattgctgcagcaaatgatgttcaggccaaaaaggaaatatatgccccctataatattctacccctggattcggctggagcttctcagtccattatgcaacttgaggaggttaaagcagccgtttctgctctctcaaatacacgtgggttgaattggccagcttcatttgaacagcagaggcagaaaacaggggaactggatgtgctagattggttaagggcaatgtttgggtttcagagggacaatgtaagaaaccagcgggagaatctgagtttgctccttgcgaatattcatataaggctaatccccaaggctgagccacttaacaagcttgacgatcgagctgtggatgctctaatgaacaagttgttcaaaaactacaaaacatggtgtaagtacttggggaaaaaacacagtttgcggctccctcaagctcaacaagaagcacaacaaagaaagatactttacatgggcctttaccttctaatatggggtgaagcagctaatctccgcttcatgccagagtgtctgtgttacatcttccataatatggcatatgaactccatggcctcttagcaggaaatgtgagcattgtcactggagaaaatatcaagccttcttatggtggggatgacgaatcattcctgcgaaaggtcattactcccatttaccgcgtgattgataaggaagccaaaaaaagcaaagatggaaaagcaccgtactcaaattggtgcaattatgatgatctgaacgaatatttctggtcgcaagattgcttttctttaggttggccaatgcgtgatgatggcgacttctttaagtcaacacgtgacaccacacaaggaaaaggagctgctaataaaaaacctggaaaaatgggaaaatcatactttgttgagacacggtcattttggcatatcttccgaagctatgaccgtctttggaccttttttctcctgtctttgcaggccatggtcatatttgcatggagtgggattcctgtgttggatatatttaagaaggattctttatacaacctgtccagtattttcataacggcagctatgcttcgctttctccaaagtatcctggacctttttcttaacttcccgggttatcatagatggaggttcacagatgtactgaggaattttctgaaggtagttgtcagtcttgcatggtgtgtcatcctcccactattttatctccaagaaagcaactcagagctacttacgaagatccgaagttccctgacatttctagacaagatgaaggggattcctcctatgtacctaatggctgtggctgtgtatctactacccaatttacttactacagctttgtttatcttcccgatgctccgtcgatggattgagaactcggattggcttgttgtaaggttccttctgtggtggtcacagccaagaatatatgttgggaggggaatgcatgaaagtcaatttgcacttataaagtatactctcttctgggtgctacttctttgtgcaaaatttgcattcagctactttattcagataaaacctcttataaaacccacaaaaatgataatgaacatcaatcacgttcagtattcttggcatgagtttttccccgatgctaggaacaactatggggctgtggttgcactgtgggcaccagttgtcatggtttactttatggatgctcaaatatggtatgctattttctcaactttgtgtggtggtgttataggtgcctttgatcgtctgggtgagataagaactttaggaatgttaaggtcaagatttcagtctctgcctggtgcattcaacacttacttggtgcctaatgataaagctgacaaaaaaagattttcactctccaagagttttaatgaggtttcacccagcaagagaagtgaagctgcaaagttcgctcagttatggaatgaatttatatgcagtttccgcgaagaggatcttattagtgacagggagatggacctattacttgttccttattcttcggatccaagtctgaaagttatgcaatggccaccctttttacttgctagcaagattccaattgcattggacatggctttacaatttcgttccaaagatgctgacctttggaagcgcatatgtgctgatgaatacatgaagtgtgccgttattgaatgctacgagtcttttaaacttgttcttaatgccctggttgttggagaaactgagaaaaggatcataggaatcatcataaaagaagttgaaaacagcatctcaaagaacacgttcctttcgagtttcagaacaggacctttgcaaaacctttgcaaaaaatttgtagacctacttgagatactgagagatggcgatccatctaaaaggaacaacgttgtcatagcactgcaggatatgttagaaatagtgacccgtgacatgatggtgaatgaaatcggggaacttgtagaacttggtcatagtggaagggattctgggaaacagctctttgctaatactgactcaagaacagctattgcattccctcctccagtaacagcacagtgggaagaacagcttcggcgtctttatcttctcttgactgtgaaagaatcagcagttgaagttccaactaacctcgaagcacggagaaggatttcctttttcacaaattcattgttcatggaaatgccccgtgcacctcgagtgcgcaaaatgctttcattcagtgtcatgaccccatactacagtgaggaaactgtctactcaaaaggtgatcttgagatggaaaatgaagatggtgtatcaatcatttactatctccaaaagatttatccagatgaatggaataacttcatggaacgtcttggatgtaaaaaggagcaagaggtttgggaaattgaagaaaacatcttgcagctacgtcattgggcctcattaaggggacagactctctgcagaacagtaagaggaatgatgtactacagaagggctttgaagcttcaagcatttcttgatatggcttcagaaggagagattctcgaaggatacaaagctgttacagtaccatctgaggaggataagaaaagccaaagatcgttgtatgctcaattagaagctgtggctgatatgaaattcacctatgtcgccacctgccagaattatggaattcaaaagcgaaatggagatcggcatgcaactgatattctaaatttgatggtcaacaacccctctctccgtgtagcatatattgatgaagttgaagaacgggaaggtggaaaaactcagaaggtttattattcagtgttggtgaaagcagttgataatcttgatcaggaaatataccgaataaagttgcctggtgcagcaaagataggagaaggaaagcctgaaaatcagaatcatgccattgtcttctctcgtggggaagctcttcaaaccattgacatgaatcaggacaattacttggaagaagctttaaaaatgcgtaaccttcttgaggaatttaatgaagatcacggagtgcgtgcacctacaatattgggtgttcgtgagcatatcttcactggaagtgtgtcttcattggcttggtttatgtctaatcaagagacaagttttgtcaccattggccagagagttcttgcaaggcctttaagggttcgattccattatggacatccagatgtatttgacagaattttccacatcactcgtggtggaattagcaaagcttcaaggggtatcaatctcagtgaggacatatttgcaggtttcaattcaacattgcgacgtggaaatattactcaccatgaatacattcaagttggaaaggggcgagatgttggtcttaaccaaatctctctctttgaggcaaaagtggcatgtggtaatggagagcagactcttagccgagatctatacagattaggacatcgctttgatttcttccgtatgctgtcctgttatttcacaactactggattttatatcagctcaatgctggtagtcctcacagtttatgcatttttatatggtaaactataccttgcattgagtggactggaacagtctatcgtcaaagttgcaagatccaagggtgacgatgctcttaaagctgcaatggcctcacagtctgtcgttcaacttggtttattgatggccctgcccatggttatggagattgggctcgaaagaggcttcaggactgctttaggtgacattatcataatgaacctgcagttggctgctgttttctttaccttctctcttggaacaaaactccactactttggccgcacaattttacatggtggcgcgaaatacagagcaactgggcgtggttttgtcgtgagacatgagaagtttgctgagaactacaggatgtactcgaggagccatttcaccaaagcactggaaattatgatttgcctcatagcttatcaaattttcggtgtggcagttactgataatatagctttcattcttctcagtggctcaatgtggttccttgtgatttcatggttgtttgctcccttcctctttaatccttcaggctttgagtggcaaaagatagttgatgattgggaagattggggcaagtggataagcaaccatggaggcattggtgttccagcaaccaagagttgggagtcttggtgggatgaagagcaagaacatctgcagtgctctggtctaattggccgtttctgtgaagttcttctttctatgcgcttcttacttttccagtatggaattgtttatcagctaaatgtgtccaatagtgataaaagtatcatggtttatggtttgtcctggttagtcattgtgtttgtcatggtcgtcttgaagattgtatccttaggaaggaagaagttcagtgctgatttccagctgatgttcaggctgctgaaattgttccttttcattggcttcatagtcacatttgtcatgctgttcaaattcctaagtcttaccgttggagatatatttgccagcttattggccttcttgccaactggatgggctcttctttcgatagcacaggcatgtaggccagtagtgaaaggcataggaatgtggggatctgtgaaggctctagctagaggatacgattatttaatggggcttgtgatcttcacaccggttgctgttcttgcttggttcccttttgtctcagagttccagacaaggcttctcttcaaccaggccttcagcagagggcttcaaattcaacgtattcttgctggtgggaagaagcacaagtgagcttagttataatcacacaacaaacaatctgttgtatcttttttggcaaagcacaagataatgactattgttcaaggcattctgctctttggtcggtagaatataaaacttgtttgtatatttatagtttcagaatactatagcacaaggtgtatactcctttgttgtaattgctcgtgtaaccagcttggacgccactctatttcttttggctcagtcagatccaacattgtagacaaaaaaggaatgaagtaaatgcgaaaaataaagagaaaaaaaatgcacgattggaacaaaagtctccttgtgtatgatcatcacacaatta

SEQ ID NO: 497 - DNA, 5981 bp, Lycopersicon esculentum
agaggatttggggaaaaaaaccctagtttggttttgttgtaaattatggcgagtaccagtgggacgaaggctgaagggggtgtgggcccacctagaactgcctctaggagggtttctaaagcacccactatggtagaccctgctgccggagaagatcagaattcattagacagtgaacttgtgccgtcgtctttggcgtctattgctcctattcttcgtgttgctaatgaagtcgagaagcagaatcctagagttgcttatctatgtcgtttccatgctttcgaaaaagctcataggatggatccaacatcaagtggacgcggcgttcgtcaattcaagacatacctgttacatagacttgaaagggaagaagaagaaactcaacctcaacttgccagaagtgatcctagagaaattcagaaattttaccagaacttctatgaggaaaatatcagagatggccatcaaacaaagaaaccagaggagatggctaagatctatcaaattgcaagtgtactatatgatgtgctgaggacagtggtaccctcttcaaaagtggaagatgagacaaaaagatatgccaaagatgtcgaagagaaaagagattattatgagcactacaacattcttcctatttacgctgctggagtcaaaccagcaataatggaactacctgagatcaaggcttctcttcgagctataagaaatatggataatcttcccgttctcagaatgcctgatgacaaggataagtcagtcaatgatatactcgaatggcttgcttcagcctttggcttccagaaagcaaatgtggcaaatcagagggagcacttaatattgctacttgcaaatatggatataagaaacaagagtgttgatgatgatgcaaattataatgagttggacacctatacagttaagcagctgaaggataaaatattcaaaaactatgaatcatggtacaaatatttgcactgtccaacaaacctcaggtttccgccgggctgtgacaagcaacagttggagcttctttacattggcctttatcttcttatatggggggaagcttcaaatatacgattcatgccagaatgcctttgctatatcttccacaatatggcacatgagatgcatggaatactatttggcaatgtacttccagtcagtggaggtgcatatcaaccagtgtcccatggtgaggagtctttcctgcgggatgttgtgacccctatttatcaagtcattcagaaggaatctagcagaaacctgaatgggacagcaagccattcatcatggagaaattatgatgatctgaatgaatacttttggtcagataaatgttttaagctgggttggccaatggacaaaaaagctgatttctttgtgcactcagataaaagaaatacagcaaatgtgggacataataatgttgctactggaaggaggaagcctaaggcaaattttgttgaaaatcgaactttttggcacctttataggagttttgatcggatgtggatattttttatattggcacttcaggcaatggttatcattgcatggaatcagtcaggatctttgtctgtgatttttgatgcggatgtgttcaaaagcgtcttgagtattttcataactgctgctattcttaacgcgttgagagctactttggacatagtcctcagtctgagagcttggaggagcttaaaaatcacccagattcttcgctaccttctgaaatttgcatttgcagcattctgggttgtcgtcatgcctgttgcttatgcaaaatctgttcaggatccagggggagttctgagattcttcagtaatttgggaggctatattgaaaatgagtcactgtattactactgtgttgctatttatttgataccagaaatattggctgcctttatatttttcttccctttcttgcggaaatccatggagcgctcgaactggcgaatcatcagcctccttatgtggtgggctcagcctaagctttatgttggaagaggcatgcacgaagacatgttctccttgttaaagtacactctcttctggatcatgctcctcataagcaagctctcattcagctactatgttgagatattgccattagtgcagcctaccaggacaattatggatataagaatcacaagctatgactggcatgagttctttccacatatgccacataacattggagtagtgattgtcctatgggcgccagtccttctggtctatttcatggacacacaaatttggtatgctatattctctacaattgttggagggatctatggtgcattcagccaccttggcgagataaggacgctagggatgttacgatcacgatttgagtcaattccttcagcttttagtgaacgtctcgtgccatcttccaaaaaagaaaaaaagcatagatatgaggtagatgattctttggagaggaagaacatcgcgaagttctctcagatgtggaatgagttcatactgtccttgcggatggaggatctgatcagccataaggaaagagatctgcttcttgtaccgtattcgtcaagtgaagtgtctgttattcagtggcctccttttttgctcgctagtaagattccaatagcactggatatggcaaaagatttcaggggaaaagaagatgctgacctgttccggaaaatcaaaagtgatgattttatgcgctctgcagtgatcgagtgctatgagacacttagatatttgctggttggaattctggaagacaaagatgacaagatggttgtggagcagatacgcaaagaaatagatgaaagcataaaagaaaaaaggttcttaaggaaatttcggatgagtgggttgcccttactgaatgataaattggagagattcttgaatcttctggtggcagattatgaagaggaagaggcgaaaagatcacctatgattaaccttatccaagatatcatggaaattatcattcaagatgttatgtttgatggccatgaaattttggagagagctcaccagattgatagaaaggagcaaagatttgaaaggataaatatctatcttactcagaacaggtcttggaaggaaaaggttatccggcttaatttgttattgactgtgaaagagtctgcaattaatgttcctacaaatttggatgctcgccgtcgaattacttttttcgcaaactccctgtttatgaaaatgccagatgctcccagagttcgtaatatgctttctttcagtgtcttgactccttactataatgaagatgttctctattctgatgaggagcttaacaaagaaaatgaggatggtattaccactctgttttaccttcagaagatatatccagatcaatggaaaaattttgaggaccgcatcaatgatcccaagcttaaggacataagtaaagacaagaatgaattaattcgttactgggtatcatacagaggacagacacttgcaaggacagtgagaggaatgatgtactatagggaggctcttgagcttcaatactttctggattttgcagaggacaaagcaatatttggaggatatcggatcattgatatgaatcgaacagattacagagctttgaaggagcgtgcacaggcattggctgatctgaagttcacatatgtagtgtcctgtcagatctatggtgctcagaagaagtccagtgaacagcgagaccgtagttgttatgtcaatattctgaatctcatgttgacgtatccatctttacgggttgcttacatagatgagcgggatgaagctattaatgggaagtccgagaaggtttactactctgtgctggtgaagggaggtgataaattggatgaggaaatataccgtatcaagcttcctggcccgcctaaaattggggaagggaaacctgaaaatcaaaatcatgccatcatttttactcgaggagaagcattacaaaccatagatatgaatcaagataattattttgaagaagctttcaagatgaggaatgtattggaagaattcttgaaacctcatagaaagcgaagaccgacaatactaggtttaagggagcatatttttactggaagtgtctcttcgcttgcttggttcatgtccaatcaggagaccagttttgtaaccatcggacaaagaattttagcaaaccccttgagggtaagatttcattatggtcatcctgatattttcgacagaatctttcatgtaacaaggggtggtattagcaaagcttctaaaacgattaacctgagtgaagatatcttttcaggttataattcaactttacgtggaggattcgtaacacatcatgagtacatccaagtagggaagggtcgtgatgtggggatgaatcagatctctcaatttgaggcaaaggtggcaaatggaaatggagaacaaacactgagtcgtgatgtctataggcttgggcgtcgatttgatttctacaggatgttgtcgttctacttcaccacagttggtttctacttcagcagcatggctacagtgcttactgtctatgtgtttctatatggacggttatatatggtcttgagtggattggaaaagcgaattctggaggatcccacagttcgtcagtccaaagctcttgaagaggctatggctccctcatctatatctcagctgggcttgttgcttgtactccctatggtaatggaaattgggctggagagaggatttcgcacggccctgggtgattttgtaataatgcagctgcagcttgcttctgtattttttacattccaactcggaacaaaagcacattattacggtagaactatcttgcatggaggttctaaatatcgagctactggtcgtggctttgttgtttttcatgcaaagtatgcagataactacaggatgtattctcgcagtcactttgtcaaggggcttgagctgtttatgctgttaattgtctatgaagtctatggggaatcatatcgtgaatcacagttatacttgtttgttactatttcaatttggttcttggtaggttcctggttgtttgctccctttgtgttcaatccgtctggtttcgactggcaaaagacagtagatgattggacagattggaagaggtggatgggaaatcgtggaggcattgggatttcaccggataaaagttgggaatcttggtggaatggggagcaggaacatctaaaacacacaaatctaaggggtagagtgattgacattatccttgccttccgctttttcattttccagtatggaattgtctatcaccttgatatagctcacggcagcagaaatttactggtgtatggactttcttggtttgttatgctaaccgctcttctggtcttgaagatggtatcaatgggcagacgaagatttgggactgattttcagctcatgttcagaattctgaaagcacttctattccttggattcgtatctgtcatgactgtgttatttgttgtttgtggcctgaccatgagtgatctatttgctgccattcttgccttcgtaccgacaggctggggcattcttcttattggtcaagcatgcaggccctgttttaagggacttggaatttgggattcagtgatggagttggcacgggcatacgaatgcatcatgggtctgttcatattcgcgccagttgtggtcttgtcttggttcccattcgtatcagagttccagacgcggttgctcttcaaccaggcgttcagtagaggtctccagatttcaatgattcttgctgggaagaaagacgaatcatcacactcttgaagtttttgttgctattgttaaccacagttaaatctaggcattactactgatgaatgcacaaagaaatcttcttattgaatagagttcaaaatcatagatgtgtaaaaacattttgtagcaagttttagatttattacatacttgtacttcattcagatgattaatatttaattcattaatactcgtggttcttgaaa

SEQ ID NO: 498 - DNA, 1209 bp, Lycopersicon esculentum
atgagtattcagaactatgagttagcaagtgattgcaacttagagttcccacagatgggattttgtttccagcctgaaagctctgttgaaaatggttgtcaacagcagcagcaaccgaatttttggcctagtactgattcatcatcatcgagaacgattataagtcgaataggatcatcaccttctgctttttttgctacagagaggtaccttggattaacacaatatgattaccaagacaacaataatagttgtactcaactgtccaagaatcttgatcctcaaactacgtcgtatactcagcaatgtggaaatggattctcagcagattcatcagcacgagttgacaccgattttcctaagatttcaatgccatcattcatcagatcacagttttcaagtagtcaaccatttggtcctgaaggactatatggaaatccttttagtaatctatcagagaaagagagaattttgctgcttaagagtaagttgtttagagaaattgactcttcaaataggcagcctgcttcaatcccttttcaaggaaatcaagactatggtgtctcaaataatacatgtggttttaacttggtacatataaggcaacaatctggaagtcaaccagcaaatagttttaacaactctggatgttctggaggatctttatcgagtaaggcacgaatcagatggactcaggatcttcatgatcgattcgttgagtgtgtaaatcgtcttggaggagctgacaaggcgacgccaaaggcaatactaaagctgatggattcagaaggcttaacaatttttcatgtaaaaagtcatttacagaaatatcgaaatgcaaagttcatcccagaatcgacagaagggagatctggaaaaacagactgcccgaataatgtgacacagatcgacagcaaaactggaatgcaaatcaaagaagcactgcatatgcaactagaagtccagagacgccttcacgagcaactagagattcagcggaagttacaattgaggatcgaagaacaaggggagcagttgaagaagatatttgaacaacaacaacaaacaactaggagtctcttggagacgcgaaattcaagcatttcgtctcctgctgatcagttcaccccgcacgaagatgaagtttttgctgcagaaagcttcaataatactcatttccaatctaatataagttacaatgatatgtaa

SEQ ID NO: 499 - DNA, 1431 bp, Lycopersicon esculentum
atggaggcgcgtcctgctttatctgtccagaggacgggtgcacatcaactcagtaattttggagcatcaggagctcattcttcattacctgtgcttcaaacaagcctggaagagaaatatcctaagttgccaggatctgccctttcttcgtttccttcaaacagtggggctgtcggtcatttgttttcctcaccatcggagttctcgaccaatcttgacttttcatctgttctgccttatgatgagcatttggcacctgcaactttcatttctcagccaacaattaatgaggcatcaattccattagctaattctggagttcttcaaggtgctgcatcaagccagtatgttaatgtaaatagtgaatcctggtgtacagagttattgcctgattaccttgattactcggtaaatgcccctgtccagaacactcagcttgattgtagaaattcagatgattgtcagatcccacctgaggatcctagtaaacaaagtgattggccggaatgggctgaccttgtaatgagtgatgatgatgctttgacttctagctggatggttgatactagcattgctgatgcagaaccaaagatgcaatatcaggaacaaaatcaactttctaatttcccagtacaccaagttcaaccattccagcaaattcctactgcatctgtagaaacatctgctgttgttcctgcatctgtggaaacgtctgctgttgttcctgcatctgtggaaacatctgctgttgttcctgcatcatccactgggagtggttcttcatcgaaacaacggatgcgttggacaccagaacttcatgaagcctttgtagaagcagtcaacaagcttggtggaagtgaaagagctactcccaagggtgtgcttaagttaatgaaagtcgaaggtttgaccatctatcatgtaaaaagtcacttgcagaaatatcgaactgctagatataaaccagaagcatcagagggttcctctgagaagaaagagtcatccattggcgatttgtcagctctggacttaaaaacgggtattgagatcactgaagcattgcggttacagatggaagttcagaaacagctgcatgaacagcttgagatccaaagaaatctgcagctgcgaatagaagaacaaggacgatgcctccaaatgatgtttgagaagcaatgcaagtcgatgcctggtattgacttggcaaagggctcatcatccatggcagaggatgcctccgcacagctgaacgatgcagttcaaagttcctcaaacaaaaatgatccaggagcgtcactggtcggtcatcacgaagcaggaagtcatacaactcaacaactggtgagggagaagcagaaagagcatgaaagagaagatattactagctcatcaaattcgccaccaacgaaacgtgctaaggttgatgaataa

SEQ ID NO: 500 - DNA, 1245 bp, Lycopersicon esculentum
atgaacacgcgccgtgcattaggtattcaaagatctagtgaaacacagcacagtaatatgggtgtctgtggagctatgtcgacatctttgtccattttgccgtcatttgaagagaagcatcttaaagtgacagattctcttcatgtgctcacagaaaaggaacaaaccacaaaccttatttcctcacgggcaatcccgtctgcatctaaaagtggaacagtagggcatctgttatcttccacttctggaccccacaaacattttcacttttcttcaaccccctctcgagaaagtaggaaacataactatccatttatttctagtgaagcttctgcagcaacctgccaatcttcactctcaaacattcattcgacatcattggataattaccccatggagaacagcaataattcctggggcgaagatgcatatcatgactgtataaatttttctactaatgttcctgttcagaatgaccaagtcgaaagccttgcagtagtcatgacgtctgatgaccaggttaagagatctgattggcaggactgggctgatcagctaattaatgatgatgatgttttggattcgagctggagcaatattcttgttgatatcaatcctccagacactaagtttctgagagcatctgaagtccatgctggccagtccgatactcttcctcctcctcttcctgctgctgctgcatcgtctgggcaaaactacccagttggtagcccatcgtctaccgcagcacagacgaaacctcggatgcgatggacacccgagcttcacgaagtctttgtagaagctatcagtaagcttggtgggagcgaaaaagctacaccaaagggagtcttgaagctcatgaatgttgaaggcctaaccatctatcatgtcaaaagccacttacagaaatatagaactgccagatacaaaccagaatcctcggaaggaacaccggaaaagaagaccaccagtgtgacagagatgccatctttggacctgataacgaccatggggataacagaagcactaagaatgcagatggaagtccaaaagcagcttcacgaacaacttgagatccagagaaagttgcagttgcggatcgaagaacaaggtaaataccttgaaatgatgtttgagaagacaaaggacataggaaaagatctaaaggtatcatcatcatcaagaacagatgaacatccttcaccatccaataagatgaagcatacatctcccaacgactaa

SEQ ID NO: 501 - DNA, 1353 bp, Lycopersicon esculentum
atggaagcacgtcctgctgtgtctgttcaaagtgtggttgcaagtcaactcagtaattgtggtgcatcaggggcactttcttcttccctgtctatatttccaacagcccttggagaaaagtaccctaagtttcctgacttgcagcaggcttcgatgggaaaggagctcaagcaacatcctgcaactgttgtctcttctttgccttccaacagtggggctgttggtcttatgttctcatcatcatcaggattttccgccgatcttcagttctcatctgtttcaccccaggaaaagcattcaggaactgcacctttcatttctcagtcaacatatagtgagacatcgatccaattacctcattcgggagttcttcagtccacagcatcaagccaatatttgaatgaaaaccatgaaccctggtgtatagatccactgcctaatttccttgattattcgatggataaccctgtccagaatagtcaggtagcttctagcaataaacaaagcgattggcaggagtgggccgaccttgtactcaatgatgaagatgctctaccttctgattggaatgatattattgctgatacaagtattggcgactcggagctgaagatgcaatttcaggaggaaaaacaacctttgaatttcccaatgcagcaagtccaagcatcacagcaaatcccacctgtgcctgtagaaacttcagctattgctcctgtatcatcccctgcaagtagtgctgcaacaaagcagcgcatgcgttggactccagaacttcatgaagcctttgttgaagcagtcaacaagcttggtggaagtgaaagagctactcccaaaggggtgctaaaaatgatgaaagttgagggtttgaccatctatcacgttaaaagccatttgcagaaatatcgaacagctagatataaaccagaagcatcagaagctgggtcttcagagaaaaaacaatcttcactagatgatttggcatctctggacttaaagacgggaattgagatcactgaggcattacgattgcagatggaagtgcagaagcgtctccatgaacagcttgagattcaaagaaacctgcagcttcgtatagaagaacaagggcgatacctccagatgatgtttgagaagcagtgcaagtcaatgcctggcgcagacttggctaaaggctcatcatcttctacagcagatgatgcctttgcacagttgtcacaggttgacactgctaaagaagttgatcacgagaaacagaaagagcgggaaatagaagttcttggagatcctgagacaaatataaccagcacatctgattcacctcctttgaagcgctctaaattggatgaataa

SEQ ID NO: 502 - DNA, 816 bp, Lycopersicon esculentum
atggtaggggaagatgtattcaatgaattaccagaagattgtatttcttcaattctttctcttacttcacctaaggatacaattagcttctctttggtttcatcctttctccgattagtggcagcatctgattttgtctggcaaacattattgccttctgattataataaaattattgacaaatctgtcatacccttgaactattcttctaaaaaagagctttttattcgtctctgtaattcgattctcattgatggtggtaaaaagagctttgccttagagaaatcaagtggaaaaaaatcatttataatctcagctggagaattgtcccttttatatggggaagaaccagatcattggacctggaaatctctgccagaatcaaggttctcaaaagtggctgaactgaaagtgatatgcaaattagaagtaaaagcaaagctgatgacaagtatgctttctgcaaacacgaattatggaatttatttcataatgaaaatcacagatcgtgcatttggtctgagttcagtgccggttgagactagtgtagaaattggtaatcagaaagatgttcacacggcgactctagatcaccggaaggacgaaaaagatctgccggaaggaaaacagaggtatgaaagagtgccgtataaaagggaagatggatggatggaaattgagttaggagaatttttaaacagtggagatgatgatgaagatgaagaagttacagtgagtttaaaggaggtgaagggatgccatgtaaaaagtggactggtcattgaaggcgttgaagttaggcctaaacactactaa

SEQ ID NO: 503 - DNA, 789 bp, Lycopersicon esculentum
atggattttttccgattattgccggagggttgtgtttctgatattctcttcttcacttctccgaaggacgctgcgatttcatctgcagtttctcgaggattcaactccgctactgaatcggaccttctctggggaaagtttttgccggatgattacgaagatattagctccagatatgtctctccgaggatttgttcgtcgaaaaaggagctttactttagtctctgtgattcccctgttttaatggatggaggcaaattgagcttttcacttgataagaaaacagggaagaagtgttttatgatatcagcaagagaacttgctatttcatggggagttgatacaccatggcactgggaatggattgctcaccctcagtccagattttcagaagtggctcatctccacactgtatgttggcttgatatacgaggcacgattggatcacaaatgttgtcaaaaagaagtaaatatgttgtttatttagtgttcaaattggcagaggaacattatggactagatattgcttatgcatctgttaggtttgtgaatagtgtgagcgataaagaagctgaggaacgagctagcattttgagtttagtcggagaaaatattaattacatgacatgtccacaaaaaagagtcgatggatggatggaaatggaactgggaaattttattaatgacataggagatgatggagatgttgaagcgcgatttatggagattaagcatcttgatggaaaaggcagacttattgttcaaggaattgaatttagaccagaatga

SEQ ID NO: 504 - DNA, 837 bp, Lycopersicon esculentum
atggagcacttatatgatctgccagaagattgtattagtagcataatatgtctcacttctccacctgatgcactaaaattgtcacaggtttcttcaattttccggtcagtcgcagagttggattgtgtttgggatgctttcttgccttctgattggcaacatattgctacaaaatcagtcacgcctttgaagttttcttcaaaaagacacctttttatatgcctgtgcaattccattctaatagacgatggcaacaagagctttgctttggataaagtaacggggaaaaagtcatatctcatgtctgcaaaagagctctctattttatatggagatgaactaactcactggaactggaaagctattccagaatcaaggtttgcagaggtagctgaactgaaaacaatatgcagactggaaatagaggggaagatgaaaacaggggatctatctccaaacacaacatacggagcttatctactcatgaagatttcagatcgatcattcgggttggattcaattccatcagaggtcagtattatagtcggggatcaagaacccgtcaacagtagtgtgtatctacggcacccaaggagcaagaagctagagtctctgttttacagaaacagagtggaaacgttaaaagcaagagtgaacaaaggggaggaaaaaatggttggggaaagagaagatgggtggttagaaatagagcttggagagttctttaatggaggatatggtgatgaagagatcataatgaaattaatggaggtgaagggctgtcatattaagggtggccttatcattgaaggcattcagttaaggcctaagcactaa

SEQ ID NO: 505 - DNA, 894 bp, Lycopersicon esculentum
atggcggtggagagattcgcctgcggcgacgaactgccggaaggttgtatagctacggcactgtcgttgacgagccccaaggacgcctgccggctggcgctggtggcttcaactttccggtcagcagctgaatccgacgccgtttgggaacggtttctgccgccggattattatgatatcatttcccggtccattgacggtccagattcacttaatttcggttcaaagaaagacctttacttatacctatgtgataaccctattctcatcgacggtggtaccaggagcttctcattggagaaagggagtggaaagaaatgttacatgttagctgcaaggtcgttgcaaattgtttgggtcgatacgcctaggcattggagatggatttcccttcctgagtcgaggttttcagaagttgccgagcttcttgatgtctgctggtttgacatatctggcaaaataaacacaaatatgctctcccctgacactacatatggcgcttaccttgtgttcacgacaaaaaccaggacctgtggatttgaaaaccaacctgcagagagttcagtagggattgctgggcatgaaagatatacacatacattttatttgaaccctcagggaggaaggagacagtacagataccaagtagtcccgcgacggttaggaatattcacccaccacatggctcgcatattgagagaggaaacggaagatgcaccaaaagggtgtcgtcctaagcagagaagtgatgggtggatggaaatagagttgggagaattctttgtcaagaggggacaagaagctgaagtagagattagtttaacagaggtaaagggaggtgacaggaaagctggcttaattattgaagggattgatatcaggcctaaggagtaa

SEQ ID NO: 506 - DNA, 927 bp, Lycopersicon esculentum
atggcggtggaaattggacgtagctccggtggtggcggtggtgatatctgccacctgccggaaggttgcatagccaacgtactatcattgacgagtccgagagatgcgagtaggttatcggtggtcggtacggttttccggtcggctggtgaatctgacgccgtttgggaccggtttttgccgtcggattaccgtgatattatttcccggtctagtgatggaccggaatcgttcaatgtcggttctaagaaagagctttatctctatctatgtgatcatcctttcttcatcgacggtgggactaagagcttctcattggagaagcagagtggaaagaaatgctacatgttagctgcgaggtcgctagcaattatttgggctgacacaccacggtattggagatggatcccccttcctgagtccaggttcccagaggttgctgagcttcttgacgtgtgctggtttgatatttctggcaagataaacacctctatgctatcccctgacaccaactacgcagcctactttgtgttcacaacgaaatccaggacctacggttttgatcaccaaagtgcagagggtgcagtagggatttcagggcatgaaaggaaaccgcagacagtattcttggatccagaggcagcacgtaggcacatgtaccaaatcgttccaagaagatcgggactgcttagccagatggctgatatgctgagaggaggagtgaatcctcctcctccagaaaacgatgcacaagcacgatacccacaacagagaagtgacggatggatagaagtcgagttgggagaattctttgtcaagagagggcaagacgttgaactcgagataagcttgacagaggtgaaggaaggtaactggaaaagtggcttggttgttgaagggattgaaatcaggcctaaggaagggtaa

SEQ ID NO: 507 - DNA, 1551 bp, Lycopersicon esculentum
atgaaatcgacggttcatttggggagagtgagcactggtggctttaacaatggagagaaggagatttttggggagaagatcagagggagtttgaacaacaatctcaggattaatcagttgtcgaaaagtttgaaacttgagaagaagattaaacctggggttgcttactctgtgatcactactgaaaatgacacagagactgtgttcgtagatatgccacgtcttgagagacgccgggcaaatcccaaggatgtggctgcagtcatattaggaggaggcgaagggaccaagttattcccacttacaagtagaactgcaacccctgctgttccggttggaggatgctacaggctgatagacatcccaatgagcaactgtatcaacagtgctattaacaagatttttgtgctgacacagtacaattctgctgccctgaatcgtcacattgctcgaacgtattttggcaatggtgtgagctttggagatggatttgtcgaggtactagctgcaactcagacacctggggaagcaggaaaaaaatggtttcaaggaacagcagatgctgtcagaaaatttatatgggtttttgaggacgctaagaacaagaatattgaaaatatccttgtattatctggggatcatctttataggatggattatatggagttggtgcagaaccatattgacagaaatgctgatattactctttcatgtgcaccagctgaggacagccgagcatcagattttgggctggtcaagattgacagcagaggcagagttgtccagtttgctgaaaaccaaaggtttgagcttaaagcaatgctagtagatactagtcttgttggattatctccacaagatgcgaagaaatccccttatattgcttcaatgggagtttatgtattcaagacagatgtattgttgaagctcttgaaatggagctatcccacttctaatgattttggctctgaaattataccagcagctattgatgattacaatgtccaagcatacattttcaaagactactgggaggacattggaacaattaaatctttctataatgctagcttggcgcttacacaagagtttccagagttccaattttacgatccaaaaacacctttttacacatctcctaggttccttccaccaaccaagatagacaattgcaagattaaggatgccataatttctcatggatgttttttgcgagattgcactgtggaacactccatagtgggtgaaagatcgcgcttagactgtggtgttgaactgaaggatactttcatgatgggagcagactactaccaaacagaatctgagattgcctccctgttagcagaggggaaagtaccgattggaattggggaaaatacaaaaataaggaaatgtatcattgacaagaacgcaaagataggaaagaatgtttcaatcattaacaaagatggtgttcaagaggcagaccgaccagaggaaggattctacatacgatcagggataatcattatatcagagaaagccacaattagagatggaacagttatatga

SEQ ID NO: 508 - DNA, 1161 bp, Lycopersicon esculentum
atggcttgttctataaagctatcatctttatcaatcacacattcaaatttgatttcaaaaagggattataatcaaaatcttggatttttatcattttcttcaaccccaaaatcaaagaatcaaaaatggggtttttcttattcaatcaaaaaacctctttacatatcaagaattgaaaatcccaaagcatatgaagctgacaagtctcagtctttagatttaaatattgagttgccaaaatcacaagtcgatggtcagagggttaaaattggcatatattttgctatatggtggggtttaaatgtggtttttaatatatataacaagaaagttctaaatgcatatccatttccttggttgacttctactttgtcacttgctactggttcattgattatgttgatttcatgggctatgaaaattgctgaattcccaaaaacagattttgaattttggaagaacttgttccctgttgcagttgctcatacagttggtcatgtagcagccactgttagtatgtctaaagttgctgtttccttcactcatataatcaagagtagtgaaccagcttttagcgtgttggtttcgaggtttttgcttggtgaaacatttccgtttccagtatatttatcgcttgtgcctgttattggtggttgtgcattatcagctgctacagagctcgatttcaacatgactggttttatgggagcaatgatatcaaatcttgcatttgtgtttcgaaatatattctcaaagaaaggaatgaaggggaactctgttagtggaatgaactattacgcgtgtttatctattatgtctctgttaattctaacaccttttgcaatcgcgatggaggggcctcagatgtgggcattaggatggcgaaacgctctctctcagataggacctaactttgtttggtggatcgttgcacaaagcatattctatcacttgtataaccaagtgtcatatatgtccctggatgagatttctcccctgacgtttagcgtaggaaatacaatgaagcggatttctgtaattgtttcctccatcattatcttccaaacaccggtccgacccatcaatgcacttggagctgccattgcaatccttggaaccttcatttattcacagctattagatcaacgagaattggagtga

SEQ ID NO: 509 - DNA, 1981 bp, Lycopersicon esculentum
atagggcaggcgttataatagaggaaccaaaataaaaagaccccaccttccatcaaactctattagccaccctagtttttttctgctatttcaacatacactttcttccataaattcttgttttttgtatacataaaaaaaaaaaacttgttttgtggatcatcacatcacatgtttgatcttgttttacactgagatttcaatatttttctctgtgtttatatcacacaagtagatctccttctcacttacacagagtgcacatggtttttcaggctctttctacgtagacggagccgtgaagagaaacctttttttttttcttttcttttcaagttttctgtaaaatcttgatctggggttttggggttttttgtgtttttgatcttataataaaaaaaagttttaatttttagtcaaaacccatctgaattttcgcttgccagctcaaaggattttgaaccatgatgtctacagtgaagcaagcagcttttacaatcaatgggtgtgatttcattcggtcaaagtctcaatctttggcttctacacgccgtatctctctacttccgccattaccggcgatgaagtctcgccggagctccggtgtatcggtgtcgaagcctgtttttgtttcttctgttgagagttttgggggtttgaagagatctaatgagaaaactgatagtggtttggttaagtgtaaggcttatgaagcggatcgggctgagccgatggaaggacctgaatcgaaagcggagttggcaaggaagatgaagatcggtgtttattttgctacttggtggtttttgaatgtgatttttaatatttataataagaaagtgttgaatgcttttccatttccttggttaacatcaactttgtcacttgctgctggttcacttattatgttgatttcttggactcttagaattgcagaagctcctaaaactgatcttgaattctggaaaactctcttaccggttgccattgcacatacaattgggcatgttgcagctacagtgagcatgtcaaaggtggcagtttcattcactcacatcatcaagagtggtgaacctgcttttagtgttttggtttcaaggttcctcttgggagagtcattccctaccgccgtttacttatctcttatccccatcatcggtggttgtggtctttctgcgcttacagagttgaacttcaactggattggtttctcgggtgctatgatctcgaatgtggcatttgtcttcagaaatatattctccaagaagggtatgaaggggaagtctgttagtgggatgaactactatgcttgcttgtctatgctgtctttgttgattctcacaccatttgccattgctgttgagggaccacaaatgtgggctctaggatttgaaaaggctgtctctcaaatcggtccccagatcgtctggtggatggcggcccagagtgtattttatcacctctacaatcaagtttcgtacatgtctttggatgagatctctcctttgacgtttagtattggaaacaccatgaaacgtatatcagtaatcgtctcttccatcattatcttccgtacacccgtccagccagtcaacgctcttggagctgccattgcgattcttggaactttcttgtactcacaggcaaaacaatgaagagtggggatttgcataccgcgttagggataaaagacgttgaagagaaccttgaggtgttgcgaatgacgtctctcaggatcctcagtctacccttactttgggttgagtatgaaacttatgaagtatgtagatagcaataatgggttaaaattaactcaaatcctatagagttactaaggctggtttccctgttttgttattattattcgtagagacatcaacaagtgtactaataaactgaatacttggttgagagtggtataaattagttcatttaaacacacatttggttaataaacctcccagaatttggctcaaataaa

SEQ ID NO: 510 - DNA, 1920 bp, Lycopersicon esculentum
aggcaccctagtttttttctgctatttcaacatacactttcttccataaattcttgttttttgtatacataaaaaaaaaaaacttgttttgtggatcatcacatcacatgtttgatcttgttttacactgagatttcaatatttttctctgtgtttatatcacacaagtagatctccttctcacttacacagagtgcacatggtttttcaggctctttctacgtagacggagccgtgaagagaaacctttttttttttcttttcttttcaagttttctgtaaaatcttgatctggggttttggggttttttgtgtttttgatcttataataaaaaaaagttttaatttttagtcaaaacccatctgaattttcgcttgccagctcaaaggattttgaaccatgatgtctacagtgaagcaagcagcttttacaatcaatgggtgtgatttcattcggtcaaagtctcaatctttggcttctacacgccgtatctctctacttccgccattaccggcgatgaagtctcgccggagctccggtgtatcggtgtcgaagcctgtttttgtttcttctgttgagagttttgggggtttgaagagatctaatgagaaaactgatagtggtttggttaagtgtaaggcttatgaagcggatcgggctgagccgatggaaggacctgaatcgaaagcggagttggcaaggaagatgaagatcggtgtttattttgctacttggtggtttttgaatgtgatttttaatatttataataagaaagtgttgaatgcttttccatttccttggttaacatcaactttgtcacttgctgctggttcacttattatgttgatttcttggactcttagaattgcagaggctcctaaaactgatcttgaattctggaaaactctcttaccggttgccattgcacatacaattgggcatgttgcagctacagtgagcatgtcaaaggtggcagtttcattcactcacatcatcaagagtggtgaacctgcttttagtgttttggtttcaaggttcctcttgggagagtcattccctaccgccgtttacttatctcttatccccatcatcggtggttgtggtctttctgcgcttacagagttgaacttcaactggattggtttctcgggtgctatgatctcgaatgtggcatttgtcttcagaaatatattctccaagaagggtatgaaggggaagtctgttagtgggatgaactactatgcttgcttgtctatgctgtctttgttgattctcacaccatttgccattgctgttgagggaccacaaatgtgggctctaggatttgaaaaggctgtctctcaaatcggtccccagatcgtctggtggatggcggcccagagtgtattttatcacctctacaatcaagtttcgtacatgtctttggatgagatctctcctttgacgtttagtattggaaacaccatgaaacgtatatcagtaatcgtctcttccatcattatcttccgtacacccgtccagccagtcaacgctcttggagctgccattgcgattcttggaactttcttgtactcacaggcaaaacaatgaagagtggggatttgcataccgcgttagggataaaagacgttgaagagaaccttgaggtgttgcgaatgacgtctctcaggatcctcagtctacccttactttgggttgagtatgaaacttatgaagtatgtagatagcaataatgggttaaaattaactcaaatcctatagagttactaaggctggtttccctgttttgttattattattcgtagagacatcaacaagtgtactaataaactgaatacttggttgagagtggtataaattagttcatttaaacacacatttggttaataaacctcccagaatttggcccaaaaaaaaaa

SEQ ID NO: 511 - DNA, 1645 bp, Lycopersicon esculentum
gtatactgaagtactactactactactggcctcactagtcttttggccatagtagcaagatacttattttagtactacatttcaaatggccttctctgctggacaatcttatgcattttcaacaaattttgatcccttgcaacaaaatttatggggttgtaagcctcatatttcatcattttccctcaaagatatcaactttaaacaatgtgataagcctaacatcttgtctaaaaaacctctatacatttcagcagtactaagtggattcggacatgctgatgaatcaaaagagttcaaatctagggaccctttagtccaatgcaatgcatatgaagctagtcgaccccaatcgataccaatcaacattgagtttggccaagaagctcaggctgctgctactcagaagctcaagattggactctattttgcaacatggtgggctttgaatgttgttttcaatatttacaacaagaaggttttgaatgcatttccatttccatggcttacttctactctttctctggctgctggctctcttatgatgttggtttcttgggctactaagattgctgaaactccaaagactgactttgatttttggaaagccttgtttcctgttgctgtggctcacacaattggccatgtggctgcaacagtgagcatgtcaaaagttgctgtttcattcactcatattattaagagtggagagcccgcttttagtgttttggtttcaagattgttaggtgaaactttcccattgccagtgtacctttcacttttgccaattattggtggttgtggacttgctgctattactgaactcaacttcaatctaataggctttatgggagcaatgatatcaaacttggcatttgtattcagaaacatattttcaaagaaaggcatgaaggggaaatcagttggagggatgaattactatgcttgtttatcaatgatgtctctattgattctgactccctttgctattgctgtggagggtccacaagtatgggcacttggatggcagaatgcagtcacccaaattggcccaaattttatatggtgggtggtggcccaaagtgtgttctatcacttgtacaatcaagtctcctacatgtctctaaatgagatctccccactgacatttagcattggtaacactatgaagagaatttctgtcatagtctcatccatcatcatctttcaaattccaattcaaccaatcaatgcccttggtgctgctattgcaatcttaggaactttcctctactcacaggctaaacagtaaacacttgttatagatgagatattatcatgttatcaatttgtgactactagcagtattgtttttttcccctagcaaatgactggagatggatgtagaaaatgggcagcctcagtgaatgaatgtgccttttgagtaattgaaatgttaacaaaaaaaaaatggctcttcctagctgcaattcccatccaagaatttgtaatcacctttatgttgtgaactaatatgactacatagtatgcctttgtgtgatatattattgtaaagtttgatttgctctatttcatacatgttaagactgcttctgataatatttgtctaaaatagttagaatgaagataatataggttttattgg

SEQ ID NO: 512 - DNA, 1656 bp, Lycopersicon esculentum
ggtatactgaagtactactactactactggcctcactagtcttttggccatagtagcaagatacttattttagtactacatttcaaatggccttctctgctggacaatcttatgcattttcaacaaattttgatcccttgcaacaaaatttatggggttgtaagcctcatatttcatcattttccctcaaagatatcaactttaaacaatgtgataagcctaacatcttgtctaaaaaacctctatacatttcagcagtactaagtggattcggacatgctgatgaatcaaaagagttcaaatctagggaccctttagtccaatgcaatgcatatgaagctagtcgaccccaatcgataccaatcaacattgagtttggccaagaagctcaggctgctgctactcagaagctcaagattggactctattttgcaacatggtgggctttgaatgttgttttcaatatttacaacaagaaggttttgaatgcatttccatttccatggcttacttctactctttctctggctgctggctctcttatgatgttggtttcttgggctactaagattgctgaaactccaaagactgactttgatttttggaaagccttgtttcctgttgctgtggctcacacaattggccatgtggctgcaacagtgagcatgtcaaaagttgctgtttcattcactcatattattaagagtggagagcctgcttttagtgttttggtttcaagattgttaggtgaaactttcccattgccagtgtacctttcacttttgccaattattggtggttgtggacttgctgctattactgaactcaacttcaatctaataggctttatgggagcaatgatatcaaacttggcatttgtattcagaaacatattttcaaagaaaggcatgaaggggaaatcagttggagggatgaattactatgcttgtttatcaatgatgtctctattgattctgactccctttgctattgctgtggagggtccacaagtatgggcacttggatggcagaatgcagtcacccaaattggcccaaattttatatggtgggtggtggcccaaagtgtgttctatcacttgtacaatcaagtctcctacatgtctctaaatgagatctccccactgacatttagcattggtaacactatgaagagaatttctgtcatagtctcatccatcatcatctttcaaattccaattcaaccaatcaatgcccttggtgctgctattgcaatcttaggaactttcctctactcacaggctaaacagtaaacacttgttatagatgagatattatcatgttatcaatttgtgactactagcagtattgtttttttcccctagcaaatgactggagatggatgtagaaaatgggcagcctcagtgaatgaatgtgccttttgagtaattgaaatgttaacaaaaaaaaaatggctcttcctagctgcaattcccatccaagaatttgtaatcacctttatgttgtgaactaatatgactacatagtatgcctttgtgtgatatattattgtaaagtttgatttgctctatttcatacatgttaagactgcttctgataatatttgtctaaaatagttagaatgaagataatataggttttattggaaaaaaaaaa

SEQ ID NO: 513 - DNA, 2204 bp, Lycopersicon esculentum
atagggcaggcgttataatagaggaaccaaaataaaaagaccccaccttccatcaaactctattagccaccctagtttttttctgctatttcaacatacactttcttccataaattcttgttttttgtatacataaaaaaaaaaaacttgttttgtggatcatcacatcacatgtttgatcttgttttacactgagatttcaatatttttctctgtgtttatatcacacaagtagatctccttctcacttacacagagtgcacatggtttttcaggctctttctacgtagacggagccgtgaagagaaacctttttttttttcttttcttttcaagttttctgtaaaatcttgatctggggttttggggttttttgtgtttttgatcttataataaaaaaaagttttaatttttagtcaaaacccatctgaattttcgcttgccagctcaaaggattttgaaccatgatgtctacagtgaagcaagcagcttttacaatcaatgggtgtgatttcattcggtcaaagtctcaatctttggcttctacacgccgtatctctctacttccgccattaccggcgatgaagtctcgccggagctccggtgtatcggtgtcgaagcctgtttttgtttcttctgttgagagttttgggggtttgaagagatctaatgagaaaactgatagtggtttggttaagtgtaaggcttatgaagcggatcgggctgagccgatggaaggacctgaatcgaaagcggagttggcaaggaagatgaagatcggtgtttattttgctacttggtggtttttgaatgtgatttttaatatttataataagaaagtgttgaatgcttttccatttccttggttaacatcaactttgtcacttgctgctggttcacttattatgttgatttcttggactcttagaattgcagaagctcctaaaactgatcttgaattctggaaaactctcttaccggttgccattgcacatacaattgggcatgttgcagctacagtgagcatgtcaaaggtggcagtttcattcactcacatcatcaagagtggtgaacctgcttttagtgttttggtttcaaggttcctcttgggagagtcattccctaccgccgtttacttatctcttatccccatcatcggtggttgtggtctttctgcgcttacagagttgaacttcaactggattggtttctcgggtgctatgatctcgaatgtggcatttgtcttcagaaatatattctccaagaagggtatgaaggggaagtctgttagtgggatgaactactatgcttgcttgtctatgctgtctttgttgattctcacaccatttgccattgctgttgagggaccacaaatgtgggctctaggatttgaaaaggctgtctctcaaatcggtccccagatcgtctggtggatggcggcccagagtgtattttatcacctctacaatcaagtttcgtacatgtctttggatgagatctctcctttgacgtttagtattggaaacaccatgaaacgtatatcagtaatcgtctcttccatcattatcttccgtacacccgtccagccagtcaacgctcttggagctgccattgcgattcttggaactttcttgtactcacaggtgataatttcattttttgcctttttgtatcagttctgataattgattgttctttccttgatatatataaacttcgaaaatctttagctttttccacttgaaggagttttctccgtaacttttgtcattgtaaacacgaaaatattggaatgatatgttaccaactagcttgggagttttttgtttgtttgtttgtttatcattttcattgctagtctctaataaacctaaaactctttgaatgttatgcaggcaaaacaatgaagagtggggatttgcataccgcgttagggataaaagacgttgaagagaaccttgaggtgttgcgaatgacgtctctcaggatcctcagtctacccttactttgggttgagtatgaaacttatgaagtatgtagatagcaataatgggttaaaattaactcaaatcctatagagttactaaggctggtttccctgttttgttattattattcgtagagacatcaacaagtgtactaataaactgaatacttggttgagagtggtataaattagttcatttaaacacacatttggttaa

SEQ ID NO: 514 - DNA, 1949 bp, Lycopersicon esculentum
atagggcaggcgttataatagaggaaccaaaataaaaagaccccaccttccatcaaactctattagccaccctagtttttttctgctatttcaacatacactttcttccataaattcttgttttttgtatacataaaaaaaaaaaacttgttttgtggatcatcacatcacatgtttgatcttgttttacactgagatttcaatatttttctctgtgtttatatcacacaagtagatctccttctcacttacacagagtgcacatggtttttcaggctctttctacgtagacggagccgtgaagagaaaccttttttttttcttttcttttcaagttttctgtaaaatcttgatctggggttttggggttttttgtgtttttgatcttataataaaaaaaagttttaatttttagtcaaaacccatctgaattttcgcttgccagctcaaaggattttgaaccatgatgtctacagtgaagcaagcagcttttacaatcaatgggtgtgatttcattcggtcaaagtctcaatctttggcttctacacgccgtatctctctacttccgccattaccggcgatgaagtctcgccggagctccggtgtatcggtgtcgaagcctgtttttgtttcttctgttgagagttttgggggtttgaagagatctaatgagaaaactgatagtggtttggttaagtgtaaggcttatgaagcggatcgggctgagccgatggaaggacctgaatcgaaagcggagttggcaaggaagatgaagatcggtgtttattttgctacttggtggtttttgaatgtgatttttaatatttataataagaaagtgttgaatgcttttccatttccttggttaacatcaactttgtcacttgctgctggttcacttattatgttgatttcttggactcttagaattgcagaagctcctaaaactgatcttgaattctggaaaactctcttaccggttgccattgcacatacaattgggcatgttgcagctacagtgagcatgtcaaaggtggcagtttcattcactcacatcatcaagagtggtgaacctgcttttagtgttttggtttcaaggttcctcttgggagagtcattccctaccgccgtttacttatctcttatccccatcatcggtggttgtggtctttctgcgcttacagagttgaacttcaactggattggtttctcgggtgctatgatctcgaatgtggcatttgtcttcagaaatatattctccaagaagggtatgaaggggaagtctgttagtgggatgaactactatgcttgcttgtctatgctgtctttgttgattctcacaccatttgccattgctgttgagggaccacaaatgtgggctctaggatttgaaaaggctgtctctcaaatcggtccccagatcgtctggtggatggcggcccagagtgtattttatcacctctacaatcaagtttcgtacatgtctttggatgagatctctcctttgacgtttagtattggaaacaccatgaaacgtatatcagtaatcgtctcttccatcattatcttccgtacacccgtccagccagtcaacgctcttggagctgccattgcgattcttggaactttcttgtactcacaggcaaaacaatgaagagtggggatttgcataccgcgttagggataaaagacgttgaagagaaccttgaggtgttgcgaatgacgtctctcaggatcctcagtctacccttactttgggttgagtatgaaacttatgaagtatgtagatagcaataatgggttaaaattaactcaaatcctatagagttactaaggctggtttccctgttttgttattattattcgtagagacatcaacaagtgtactaataaactgaatacttggttgagagtggtataaattagttcatttaaacacaaaaaaaaaa

SEQ ID NO: 515 - DNA, 3034 bp, Lycopersicon esculentum
tggcggcccgctccaagaacttagtggatcccccggcctgcaggaattcggcaccgatttccctctctacccaaattcattagcaagagaaaaaagcaacgtaaattaaagagagaacattattatggcacttgctaaagaaattatgggtatttccctgctggagaaatcatcatcaatggcacttttgaatcccaataattatcacaaagaaaatcatctttggtttaaccagcagtttcaaggaaggaggaatttaagtagaagaaaagcgtacagacagagtaccatggcagctataagtgaaaatttggtcaaagttgtgcctgaaaaagcagtgaaattcaaagtgagagctgtagttacagtaaggaacaagaacaaggaagatctaaaggagacaattgtgaagcatcttgatgctttcaccgacaaaatcgggaggaatgtcgcgctagaactcatcagcaccgacatcgatccagatacaaaaggaccgaagaaaagcaaccaagcagtgttaaaagactggtctaagaaatcgaacttgaaaacagagcgagtaaattacacagcagaattcattgtggactcgaatttcgggaatccaggcgcgatcactgtgacgaacaagcaccagcaggagttctttctggagagtattacaattgaggggtttgcatgtggtccggttcatttcccctgcaattcatgggttcaacccaaaaaagatcatcctggaaaaagaatatttttctctaatcagccatatttaccggatgaaacaccagcaggactgaaatcattaagagagagggagctaagagaattgagaggcgatggaaaaggcgtcagaaaattatctgatagaatatatgattatgacatctataatgatcttggaaatccagatagaggcattgattttgctcgtcctaaacttggaggagaaggcaatgttgcttaccctagacgttgtcgttctggccgtgttcctacagacacagatataagtgcggagagtcgtgtggagaagccaaatccaacatacgttccgagagatgaacaatttgaggagtctaaaatgaatacattctcaacctccaggcttaaagcaacgctccataacttaattccatctcttatggccagcatttcttctaacaatcacgatttcaaaggattttcagatatcgatagcctttatagcaaagggctacttgtgaagcttggtcttcaggatgaagtcttaaaaaagcttccattgcctaaggttgttagcactatcaaagaaggagatcttctcaaatacgacacgccaaagatactatcaaaggacaaatttgcctggttacgagatgatgaatttgctcgacaagcaatagcaggagtgaacccagtgtctatcgaaaagcttcaggtttttccaccagtaagcaagcttgatcctgaaatctatggccctcaagaatccgccctcaaggaggagcacattcttggtcatctcaatggcatgactgttcaagaggctttggatgcaaataagcttttcattctggatcatcatgatgtatatctaccatttctcgatcggatcaatgcacttgatggccgcaaagcatatgcaacacgcaccatttatttcttgtctgatgttggcacacttaagcccattgccattgaacttagcctcccccagactggtccaagttcacgatccaaacgtgttgtcactccgcctgtttgtgccactggtaactggatgtggcagatcgctaaagcacacgtctgtgctaatgatgctggagttcaccaactcgtcaaccactggttgcgtacacatgcaagcttggaaccatttatattggcagcacataggcagttaagcgcgatgcatcctatttataagcttttggatccacatatgagatacactctagaaattaacggcttggctcgccagagcttgatcaatgctgatggtgtcatcgaggcttgctttactcctggtcgctactgcatggagatcagtgctgctgcctacaagaactggcgctttgatttagaaggccttccagctgaccttatccgaagagggatggcagtaccggacgcaacacagccttatgggctgaaacttctaattgaggactatccttatgctgcagatgggcttatgatatggggcgcaatcgagggctgggttcgcgattacgtagatcactactatccatcctcggcccaagtttgcagtgacagggagctgcaagcttggtatactgagactattaatgtgggccacgttgacctccgcaacgaggactggtggcccacgttagctactccagaggacctcatttccatcctcaccaccctcatctggctggcttcagcgcaacatgctgccctgaatttcgggcagtacccttacagtggatacgttccaaaccgaccaccactcatgcgtcgattaatccctgacgagaacgatcccgagtatgcggtgttcctagctgatccacaaaaatatttcttctcagctttaccaagtttgttacaagcaacaaagttcatggccgtggttgacacattatcgacacattccccagatgaagaatacataggggaaagacagcaaccgtctacttggaccggagatgcagagattgttgaagcattctacaaattttccgcggaaatagggagaattgagaaggagatagatgaaagaaatgccgatacgaatctaaaaaataggtgtggtgctggtgtattaccatatgaactattggcaccaagttcaggccctggagtaacatgtaggggtgttccaaatagtgtatcgatatgagtaattataagtatatatatattatatataacctatgtttataaagcccataaatagggcggactgctgtgtctagttatgtcaaaatgtatgtttgtatctacggctagatttttggtaagaacattaattaagttaaataattagccactaatactagcttaagtccatctaccaaaaaaa

SEQ ID NO: 516 - DNA, 3018 bp, Lycopersicon esculentum
gctcaaaaaaataaacatattcattttctaactaataaatctttcattttttccctctctaccaaattcattagcaagagaaaaaagcaacgtaaattaaagagagaacattattatggcacttgctaaagaaattatgggtatttccctgctggagaaatcatcatcaatggcacttttgaatcccaataattatcacaaagaaaatcatctttggtttaaccagcagtttcaaggaaggaggaatttaagtagaagaaaagcgtacagacagagtaccatggcagctataagtgaaaatttggtcaaagttgtgcctgaaaaagcagtgaaattcaaagtgagagctgtagttacagtaaggaacaagaacaaggaagatctaaaggagacaattgtgaagcatcttgatgctttcaccgacaaaatcgggaggaatgtcgcgctagaactcatcagcaccgacatcgatccagatacaaaaggaccgaagaaaagcaaccaagcagtgttaaaagactggtctaagaaatcgaacttgaaaacagagcgagtaaattacacagcagaattcattgtggactcgaatttcgggaatccaggcgcgatcactgtgacgaacaagcaccagcaggagttctttctggagagtattacaattgaggggtttgcatgtggtccggttcatttcccctgcaattcatgggttcaacccaaaaaagatcatcctggaaaaagaatatttttctctaatcagccatatttaccggatgaaacaccagcaggactgaaatcattaagagagagggagctaagagaattgagaggcgatggaaaaggcgtcagaaaattatctgatagaatatatgattatgacatctataatgatcttggaaatccagatagaggcattgattttgctcgtcctaaacttggaggagaaggcaatgttgcttaccctagacgttgtcgttctggccgtgttcctacagacacagatataagtgcggagagtcgtgtggagaagccaaatccaacatacgttccgagagatgaacaatttgaggagtctaaaatgaatacattctcaacctccaggcttaaagcaacgctccataacttaattccatctcttatggccagcatttcttctaacaatcacgatttcaaaggattttcagatatcgatagcctttatagcaaagggctacttttgaagcttggtcttcaggatgaagtcttaaaaaagcttccattgcctaaggttgttagcactatcaaagaaggagatcttctcaaatacgacacgccaaagatactatcaaaggacaaatttgcctggttacgagatgatgaatttgctcgacaagcaatagcaggagtgaacccagtgtctatcgaaaagcttcaggtttttccaccagtaagcaagcttgatcctgaaatctatggccctcaagaatccgccctcaaggaggagcacattcttggtcatctcaatggcatgactgttcaagaggctttggatgcaaataagcttttcattctggatcatcatgatgtatatctaccatttctcgatcggatcaatgcacttgatggccgcaaagcatatgcaacacgcaccatttatttcttgtctgatgttggcacacttaagcccattgccattgaacttagcctcccccagactggtccaagttcacgatccaaacgtgttgtcactccgcctgtttgtgccactggtaactggatgtggcagatcgctaaagcacacgtctgtgctaatgatgctggagttcaccaactcgtcaaccactggttgcgtacacatgcaagcttggaaccatttatattggcagcacataggcagttaagcgcgatgcatcctatttataagcttttggatccacatatgagatacactctagaaattaacggcttggctcgccagagcttgatcaatgctgatggtgtcatcgaggcttgctttactcctggtcgctactgcatggagatcagtgctgctgcctacaagaactggcgctttgatttagaaggccttccagctgaccttatccgaagagggatggcagtaccggacgcaacacagccttatgggctgaaacttctaattgaggactatccttatgctgcagatgggcttatgatatggggcgcaatcgagggctgggttcgcgattacgtagatcactactatccatcctcggcccaagtttgcagtgacagggagctgcaagcttggtatactgagactattaatgtgggccacgttgacctccgcaacgaggactggtggcccacgttagctactccagaggacctcatttccatcctcaccaccctcatctggctggcttcagcgcaacatgctgccctgaatttcgggcagtacccttacagtggatacgttccaaaccgaccaccactcatgcgtcgattaatccctgacgagaacgatcccgagtatgcggtgttcctagctgatccacaaaaatatttcttctcagctttaccaagtttgttacaagcaacaaagttcatggccgtggttgacacattatcgacacattccccagatgaagaatacataggggaaagacagcaaccgtctacttggaccggagatgcagagattgttgaagcattctacaaattttccgcggaaatagggagaattgagaaggagatagatgaaagaaatgccgatacgaatctaaaaaataggtgtggtgctggtgtattaccatatgaactattggcaccaagttcaggccctggagtaacatgtaggggtgttccaaatagtgtatcgatatgagtaattataagtatatatatattatatataacctatgtttataaagcccataaatagggcggactgctgtgtctagttatgtcaaaatgtatgtttgtatctacggctagatttttgtaagaacattaattaagttaaataattagccactaatactagcttaagtccatctacca

SEQ ID NO: 517 - RNA, 9 nt, Artificial Sequence
  oligonucleotide sequences that can be used to form the SiRNA loop
uucaagaga

SEQ ID NO: 518 - RNA, 9 nt, Artificial Sequence
  oligonucleotide sequences that can be used to form the SiRNA loop
uuuguguag

SEQ ID NO: 519 - DNA, 1752 bp, Solanum lycopersicum
atgcctcaaattggacttgtttctgctgttaacttgagagtccaaggtagttcagcttatctttggagctcgaggtcgtcttctttgggaactgaaagtcgagatggttgcttgcaaaggaattcgttatgttttgctggtagcgaatcaatgggtcataagttaaagattcgtactccccatgccacgaccagaagattggttaaggacttggggcctttaaaggtcgtatgcattgattatccaagaccagagctggacaatacagttaactatttggaggctgcatttttatcatcaacgttccgtgcttctccgcgcccaactaaaccattggagattgttattgctggtgcaggtttgggtggtttgtctacagcaaaatatttggcagatgctggtcacaaaccgatactgctggaggcaagggatgttctaggtggaaaggtagctgcatggaaagatgatgatggagattggtacgagactggtttgcatatattctttggggcttacccaaatattcagaacctgtttggagaattagggattaacgatcgattgcaatggaaggaacattcaatgatatttgcaatgccaagcaagccaggagaattcagccgctttgatttctccgaagctttacccgctcctttaaatggaattttagccatcttaaagaataacgaaatgcttacatggccggagaaagtcaaatttgcaattggactcttgccagcaatgcttggagggcaatcttatgttgaagctcaagatgggataagtgttaaggactggatgagaaagcaaggtgtgccggacagggtgacagatgaggtgttcattgctatgtcaaaggcactcaactttataaaccctgacgaactttcaatgcagtgcattttgatcgcattgaacaggtttcttcaggagaaacatggttcaaaaatggcctttttagatggtaatcctcctgagagactttgcatgccgattgttgaacacattgagtcaaaaggtggccaagtcagactgaactcacgaataaaaaagattgagctgaatgaggatggaagtgtcaagagttttatactgagtgacggtagtgcaatcgagggagatgcttttgtgtttgccgctccagtggatattttcaagcttctattgcctgaagactggaaagagattccatatttccaaaagttggagaagttagtcggagtacctgtgataaatgtacatatatggtttgacagaaaactgaagaacacatatgatcatttgctcttcagcagaagctcactgctcagtgtgtatgctgacatgtctgttacatgtaaggaatattacaaccccaatcagtctatgttggaattggtttttgcacctgcagaagagtggatatctcgcagcgactcagaaattattgatgcaacgatgaaggaactagcaacgctttttcctgatgaaatttcagcagatcaaagcaaagcaaaaatattgaagtaccatgttgtcaaaactccgaggtctgtttataaaactgtgccaggttgtgaaccctgtcggcctttacaaagatccccaatagaggggttttatttagccggtgactacacgaaacagaaatacttggcttcaatggaaggcgctgtcttatcaggaaagctttgtgctcaagctattgtacaggattatgagttacttgttggacgtagccaaaagaagttgtcggaagcaagcgtagtttag

SEQ ID NO: 520 - DNA, 369 bp, Solanum lycopersicum
ctgacgaactttcaatgcagtgcattttgatcgcattgaacaggtttcttcaggagaaacatggttcaaaaatggcctttttagatggtaatcctcctgagagactttgcatgccgattgttgaacacattgagtcaaaaggtggccaagtcagactgaactcacgaataaaaaagattgagctgaatgaggatggaagtgtcaagagttttatactgagtgacggtagtgcaatcgagggagatgcttttgtgtttgccgctccagtggatattttcaagcttctattgcctgaagactggaaagagattccatatttccaaaagttggagaagttagtcggagtacctgtgataaatgtacatatat

SEQ ID NO: 521 - DNA, 1180 bp, Solanum lycopersicum
gcgcttatttttaataggagcggcagacgggtgagtaacgcgtgggaatctacctttttctacgggataacgcacggaaacgtgtgctaataccgtatacgccctgagaaggggaaagatttattggagagagatgagcccgcgttagattagctagttggtggggtaaaggcctaccaaggctacgatctatagctggtctgagaggacgatcagccacactgggactgagacacggcccagactcctacgggaggcagcagtggggaatattggacaatgggggcaaccctgatccagccatgccgcgtgagtgaagaaggccttagggttgtaaagctctttcgtcggagaagataatgacggtatccggagaagaagtcccggctaacttcgtgccagcagccgcggtaatacgaagggggcgagcgttgttcggaataactgggcgtaaagggcgcgtaggcgggtaattaagttaggggtgaaatcccaaggctcaaccttggaactgcctttaatactggttatctagagttcaggagaggtgagtggaattccgagtgtagaggtgaaattcgcagatattcggaggaacaccagtggcgaaggcggctcactggcctgatactgacgctgaggcgcgaaagcgtggggagcaaacaggattagataccctggtagtccacgctgtaaacgatgagtgctagctgttgggtggtttaccattcagtggcgcagctaacgcattaagcactccgcctggggagtacggtcgcaagattaaaactcaaaggaattgacgggggcccgcacaagcggtggagcatgtggtttaattcgatgcaacgcgcagaaccttaccagcccttgacatatagaggacgatatcagagatggtattttcttttcggagacctttatacaggtgctgcatggctgtcgtcagctcgtgtcgtgagatgttgggttaagtcccgcaacgagcgcaacccctacctctagttgccatcaagtttagattttatctagatgttgggtactttatagggactgccggtgataatccggaggaaggtggggatgacgtcaagtcctcatggcccttatgggctgggctacacacgtgctacaatggtggttacaatgggttgcgaagtcgcgaggcaagggcgaattc

SEQ ID NO: 522 - DNA, 25 bp, Artificial sequence
  Single strand DNA oligonucleotide
gcgcttatttttaataggagcggca

SEQ ID NO: 523 - DNA, 22 bp, Artificial sequence
  Single strand DNA oligonucleotide
gcctcgcgacttcgcaacccat

SEQ ID NO: 524 - DNA, 291 bp, Artificial sequence
  Single strand DNA oligonucleotide
ttgctgaccgtatgagcaaggaaatcaccgccttggctcccagcagcatgaagattaaggttgttgctccaccggagagaaagtacagtgtctggattggaggatccatccttgcatcacttagcaccttccagcaggcaagtctttgtttctttaatcttctcttgcatatacttttgccatattaaactgcattttgtactacgttgttgctaacttaaacttattccattcttgatcagatgtggatttcaaagggcgagtacgacgagtctggtccatccattgtcc

SEQ ID NO: 525 - DNA, 20 bp, Artificial sequence
  Single strand DNA oligonucleotide
ttgctgaccgtatgagcaag

SEQ ID NO: 526 - DNA, 20 bp, Artificial sequence
  Single strand DNA oligonucleotide
ggacaatggatggaccagac

SEQ ID NO: 527 - DNA, 1551 bp, Solanum lycopersicum; identical to SEQ ID NO: 507

SEQ ID NO: 528 - DNA, 255 bp, Solanum lycopersicum
tgaaatcgacggttcatttggggagagtgagcactggtggctttaacaatggagagaaggagatttttggggagaagatcagagggagtttgaacaacaatctcaggattaatcagttgtcgaaaagtttgaaacttgagaagaagattaaacctggggttgcttactctgtgatcactactgaaaatgacacagagactgtgttcgtagatatgccacgtcttgagagacgccgggcaaatcccaaggatgtgg

SEQ ID NO: 529 - DNA, 1645 bp, Solanum lycopersicum; identical to SEQ ID NO: 511

SEQ ID NO: 530 - DNA, 600 bp, Solanum lycopersicum
atggccttctctgctggacaatcttatgcattttcaacaaattttgatcccttgcaacaaaatttatggggttgtaagcctcatatttcatcattttccctcaaagatatcaactttaaacaatgtgataagcctaacatcttgtctaaaaaacctctatacatttcagcagtactaagtggattcggacatgctgatgaatcaaaagagttcaaatctagggaccctttagtccaatgcaatgcatatgaagctagtcgaccccaatcgataccaatcaacattgagtttggccaagaagctcaggctgctgctactcagaagctcaagattggactctattttgcaacatggtgggctttgaatgttgttttcaatatttacaacaagaaggttttgaatgcatttccatttccatggcttacttctactctttctctggctgctggctctcttatgatgttggtttcttgggctactaagattgctgaaactccaaagactgactttgatttttggaaagccttgtttcctgttgctgtggctcacacaattggccatgtggctgcaacagtgagcatgtcaaaagttgctgtttca

SEQ ID NO: 531 - DNA, 5837 bp, Solanum lycopersicum; identical to SEQ ID NO: 489

SEQ ID NO: 532 - DNA, 700 bp, Solanum lycopersicum
atgaatctccggccaaggccaccgttcacgcgcggtagtggttatgatgacgcgccgccacggcagcagcagcctcgtgtcgagccattcaacattatacccatcaataatttgttggctgaccatccttctttgagatatccagaagtacgtgctgcttcagctgctctgcgcgacattggggatctccggctgccgccgttcatgccatggcgtgacaccatggaccttatggactggcttgggctcttctttgggttccaagatgataacgtgaagaatcaaagggagaacttggttctccagttggctaactctcaaatgcgccttcaacctccgtctaccgccccggaccgccttcactatggtgttctccggcagttccggcagaagctattgaagaattactcatcttggtgttcatatctggggaagaagtcacaggttcgactgccgagacgtcaaaatccagaaatttctcgtcgtgaactcttgtatgtatgtctgtatttattgatttggggtgaggctgcaaatctccgttttgttcctgaatgtttgtgttatatctatcatcatatggctatggaactaaattacattcttgatggtcacattgatgagaatactggacacccttttgttccttacacttgtaagcagtttggtttccttgataaagttgtcactcccatttaca

SEQ ID NO: 533 - DNA, 2727 bp, Solanum lycopersicum
atggcacttgctaaagaaattatgggtatttccctgctggagaaatcatcatcaatggcacttttgaatcccaataattatcacaaagaaaatcatctttggtttaaccagcagtttcaaggaaggaggaatttaagtagaagaaaagcgtacagacagagtaccatggcagctataagtgaaaatttggtcaaagttgtgcctgaaaaagcagtgaaattcaaagtgagagctgtagttacagtaaggaacaagaacaaggaagatctaaaggagacaattgtgaagcatcttgatgctttcaccgacaaaatcgggaggaatgtcgcgctagaactcatcagcaccgacatcgatccagatacaaaaggaccgaagaaaagcaaccaagcagtgttaaaagactggtctaagaaatcgaacttgaaaacagagcgagtaaattacacagcagaattcattgtggactcgaatttcgggaatccaggcgcgatcactgtgacgaacaagcaccagcaggagttctttctggagagtattacaattgaggggtttgcatgtggtccggttcatttcccctgcaattcatgggttcaacccaaaaaagatcatcctggaaaaagaatatttttctctaatcagccatatttaccggatgaaacaccagcaggactgaaatcattaagagagagggagctaagagaattgagaggcgatggaaaaggcgtcagaaaattatctgatagaatatatgattatgacatctataatgatcttggaaatccagatagaggcattgattttgctcgtcctaaacttggaggagaaggcaatgttgcttaccctagacgttgtcgttctggccgtgttcctacagacacagatataagtgcggagagtcgtgtggagaagccaaatccaacatacgttccgagagatgaacaatttgaggagtctaaaatgaatacattctcaacctccaggcttaaagcaacgctccataacttaattccatctcttatggccagcatttcttctaacaatcacgatttcaaaggattttcagatatcgatagcctttatagcaaagggctacttgtgaagcttggtcttcaggatgaagtcttaaaaaagcttccattgcctaaggttgttagcactatcaaagaaggagatcttctcaaatacgacacgccaaagatactatcaaaggacaaatttgcctggttacgagatgatgaatttgctcgacaagcaatagcaggagtgaacccagtgtctatcgaaaagcttcaggtttttccaccagtaagcaagcttgatcctgaaatctatggccctcaagaatccgccctcaaggaggagcacattcttggtcatctcaatggcatgactgttcaagaggctttggatgcaaataagcttttcattctggatcatcatgatgtatatctaccatttctcgatcggatcaatgcacttgatggccgcaaagcatatgcaacacgcaccatttatttcttgtctgatgttggcacacttaagcccattgccattgaacttagcctcccccagactggtccaagttcacgatccaaacgtgttgtcactccgcctgtttgtgccactggtaactggatgtggcagatcgctaaagcacacgtctgtgctaatgatgctggagttcaccaactcgtcaaccactggttgcgtacacatgcaagcttggaaccatttatattggcagcacataggcagttaagcgcgatgcatcctatttataagcttttggatccacatatgagatacactctagaaattaacggcttggctcgccagagcttgatcaatgctgatggtgtcatcgaggcttgctttactcctggtcgctactgcatggagatcagtgctgctgcctacaagaactggcgctttgatttagaaggccttccagctgaccttatccgaagagggatggcagtaccggacgcaacacagccttatgggctgaaacttctaattgaggactatccttatgctgcagatgggcttatgatatggggcgcaatcgagggctgggttcgcgattacgtagatcactactatccatcctcggcccaagtttgcagtgacagggagctgcaagcttggtatactgagactattaatgtgggccacgttgacctccgcaacgaggactggtggcccacgttagctactccagaggacctcatttccatcctcaccaccctcatctggctggcttcagcgcaacatgctgccctgaatttcgggcagtacccttacagtggatacgttccaaaccgaccaccactcatgcgtcgattaatccctgacgagaacgatcccgagtatgcggtgttcctagctgatccacaaaaatatttcttctcagctttaccaagtttgttacaagcaacaaagttcatggccgtggttgacacattatcgacacattccccagatgaagaatacataggggaaagacagcaaccgtctacttggaccggagatgcagagattgttgaagcattctacaaattttccgcggaaatagggagaattgagaaggagatagatgaaagaaatgccgatacgaatctaaaaaataggtgtggtgctggtgtattaccatatgaactattggcaccaagttcaggccctggagtaacatgtaggggtgttccaaatagtgtatcgatatga

SEQ ID NO: 534 - DNA, 461 bp, Solanum lycopersicum
aaccagcagtttcaaggaaggaggaatttaagtagaagaaaagcgtacagacagagtaccatggcagctataagtgaaaatttggtcaaagttgtgcctgaaaaagcagtgaaattcaaagtgagagctgtagttacagtaaggaacaagaacaaggaagatctaaaggagacaattgtgaagcatcttgatgctttcaccgacaaaatcgggaggaatgtcgcgctagaactcatcagcaccgacatcgatccagatacaaaaggaccgaagaaaagcaaccaagcagtgttaaaagactggtctaagaaatcgaacttgaaaacagagcgagtaaattacacagcagaattcattgtggactcgaatttcgggaatccaggcgcgatcactgtgacgaacaagcaccagcaggagttctttctggagagtattacaattgaggggtttgcatgtggtcc

SEQ ID NO: 535 - DNA, 1209 bp, Solanum lycopersicum; identical to SEQ ID NO: 498

SEQ ID NO: 536 - DNA, 399 bp, Solanum lycopersicum
tgagtattcagaactatgagttagcaagtgattgcaacttagagttcccacagatgggattttgtttccagcctgaaagctctgttgaaaatggttgtcaacagcagcagcaaccgaatttttggcctagtactgattcatcatcatcgagaacgattataagtcgaataggatcatcaccttctgctttttttgctacagagaggtaccttggattaacacaatatgattaccaagacaacaataatagttgtactcaactgtccaagaatcttgatcctcaaactacgtcgtatactcagcaatgtggaaatggattctcagcagattcatcagcacgagttgacaccgattttcctaagatttcaatgccatcattcatcagatcacagttttcaa

SEQ ID NO: 537 - DNA, 873 bp, Solanum lycopersicum
atggcagataatagagagatgaaattagacctcttgccagaagattgtattgttcaaatcctattgttcacatctcctcatgatgcttctcaattgtctttggtttcgactatggttcgtgatgcagccctatcggacttgttatgggagaaattcttgccctttgattatcgcgaaatcatcgaaagattcgtgttgccaattgccttttcgtcaaagaaagacttgtttcttaagctatttaaacctcttctcattgatggtggtagcaagagcttttcaatagacaggagaacaagtaaaaagtgttatatgttgagtgcaagggagctatcaattacttggtccaccaatcctctttactggtgttggaaacccctccttcactcaagatttccagaaggggtggagcttattatggtatgttggctagaaataaaaggaaaaataaacactcgaatgttgtctcctcgtacaacatatggagcttacctcattgtcaatctcgctggtcgtgctttcggcttagactctttgccatcagaggtctctgtcaaagtaggtgaccacgaatcgaaaggaatagtatatctacgacataacaatgacaacaagaggaaacaggaattcgaaatggtgataatgagacacagggtagagacattgagatcaagagttgatagatcaggaggccaagagcatgttttatgtgaaagagatgatggatggttggagattaaattgggtgaattttactgtgatggagtcaatgatcaacaagttacaatgtgccttagagaaattaaaggtgaacaccttaaaggaggccttattattgagggcattgagctaagacctaaactaatttattaa

SEQ ID NO: 538 - DNA, 299 bp, Solanum lycopersicum
tggcagataatagagagatgaaattagacctcttgccagaagattgtattgttcaaatcctattgttcacatctcctcatgatgcttctcaattgtctttggtttcgactatggttcgtgatgcagccctatcggacttgttatgggagaaattcttgccctttgattatcgcgaaatcatcgaaagattcgtgttgccaattgccttttcgtcaaagaaagacttgtttcttaagctatttaaacctcttctcattgatggtggtagcaagagcttttcaatagacaggagaacaagt

SEQ ID NO: 539 - DNA, 20 bp, Artificial sequence
  Single strand DNA oligonucleotide
tctcagaagacgaagcgtga

SEQ ID NO: 540 - DNA, 19 bp, Artificial sequence
  Single strand DNA oligonucleotide
cggagagcctcattgtcct

SEQ ID NO: 541 - DNA, 25 bp, Artificial sequence
  Single strand DNA oligonucleotide
aaccatattgacagaaatgctgata

SEQ ID NO: 542 - DNA, 20 bp, Artificial sequence
  Single strand DNA oligonucleotide
cagcccaaaatctgatgctc

SEQ ID NO: 543 - DNA, 19 bp, Artificial sequence
  Single strand DNA oligonucleotide
gagacgcgaaattcaagca

SEQ ID NO: 544 - DNA, 21 bp, Artificial sequence
  Single strand DNA oligonucleotide
gcagcaaaaacttcatcttcg

SEQ ID NO: 545 - DNA, 19 bp, Artificial sequence
  Single strand DNA oligonucleotide
ggtcgtgctttcggcttag

SEQ ID NO: 546 - DNA, 20 bp, Artificial sequence
  Single strand DNA oligonucleotide
tttcgattcgtggtcaccta

SEQ ID NO: 547 - DNA, 19 bp, Artificial sequence
  Single strand DNA oligonucleotide
ccctttgctattgctgtgg

SEQ ID NO: 548 - DNA, 19 bp, Artificial sequence
  Single strand DNA oligonucleotide
ccaatttgggtgactgcat

SEQ ID NO: 549 - DNA, 20 bp, Artificial sequence
  Single strand DNA oligonucleotide
tctatggccctcaagaatcc

SEQ ID NO: 550 - DNA, 20 bp, Artificial sequence
  Single strand DNA oligonucleotide
tgccattgagatgaccaaga

SEQ ID NO: 551 - DNA, 20 bp, Artificial sequence
  Single strand DNA oligonucleotide
agattagtgttgccgctggt

SEQ ID NO: 552 - DNA, 20 bp, Artificial sequence
  Single strand DNA oligonucleotide
gaaggaagggtttccaggtc

SEQ ID NO: 553 - DNA, 20 bp, Artificial sequence
  Single strand DNA oligonucleotide
cattcgttcaggaatcacca

SEQ ID NO: 554 - DNA, 20 bp, Artificial sequence
  Single strand DNA oligonucleotide
cttctttccaggccaaaatg

SEQ ID NO: 555 - DNA, 21 bp, Artificial sequence
  Single strand DNA oligonucleotide
gcttacatcctcacacatccc

SEQ ID NO: 556 - DNA, 22 bp, Artificial sequence
  Single strand DNA oligonucleotide
ccatctttggtccaatcttcat

SEQ ID NO: 557 - DNA, 16 bp, Artificial sequence
  Single strand DNA oligonucleotide
ttgtgtggtgggtagc

SEQ ID NO: 558 - DNA, 17 bp, Artificial sequence
  Single strand DNA oligonucleotide
gagcattgacgggttga

SEQ ID NO: 559 - DNA, 20 bp, Artificial sequence
  Single strand DNA oligonucleotide
gcttaggccaaggaagtttg

SEQ ID NO: 560 - DNA, 20 bp, Artificial sequence
  Single strand DNA oligonucleotide
tctatccccatcacgatgaa

SEQ ID NO: 561 - DNA, 20 bp, Artificial sequence
  Single strand DNA oligonucleotide
ctatggcaaccaggtggact

SEQ ID NO: 562 - DNA, 20 bp, Artificial sequence
  Single strand DNA oligonucleotide
atcggataacatccgttgga

SEQ ID NO: 563 - DNA, 20 bp, Artificial sequence
  Single strand DNA oligonucleotide
ctggaactaacggtcgcaag

SEQ ID NO: 564 - DNA, 23 bp, Artificial sequence
  Single strand DNA oligonucleotide
aagtgtgaataatgagtgcgtga

SEQ ID NO: 565 - DNA, 21 bp, Artificial sequence
  Single strand DNA oligonucleotide
ttttgtgaaggtttcgaagga

SEQ ID NO: 566 - DNA, 20 bp, Artificial sequence
  Single strand DNA oligonucleotide
tggtgcaatcagtcggttta

SEQ ID NO: 567 - DNA, 20 bp, Artificial sequence
  Single strand DNA oligonucleotide
accagcttcctcgtttgtgt

SEQ ID NO: 568 - DNA, 20 bp, Artificial sequence
  Single strand DNA oligonucleotide
tcaaggtgggaaaatgcttc

SEQ ID NO: 569 - DNA, 20 bp, Artificial sequence
  Single strand DNA oligonucleotide
ttcctcttcaacccatcagg

SEQ ID NO: 570 - DNA, 21 bp, Artificial sequence
  Single strand DNA oligonucleotide
tccaatctgtccagtcatcaa

SEQ ID NO: 571 - DNA, 1703 bp, Citrus clementina
tattagtttaatttagttagtaatcttttgaagaatttcgctaatacaaaatgaataatcaaggtgtattgaacttgaacatgttgcctgaagattgtgtggctatcattctctccctcacttctccatcagatgcatgcaggtctacgctggtttcatcgacgctgcgatcggcggccaagtctgacgttgtctgggagaaattcttgccgtcggattatcaagatcttgtatccagatccatcacttctttgaagttctcgtcaaagaaagagctttatcttcgtctttgtaaccctactctcatagccaatggtagaaagagcttcaaggtggataaatcatctggaaaaaaatcctacgtattgtctgcaagggagctttcaattacatggagcgataatccagagaattggagatggaaaccctcactaaaatcaaggtttttagaggcggccgaactaagaatgattagccgtttggagattgaagcaatatgttatcaccaaacacaatcttatctgagtttcaaagacaagaagaaacatcacctggagagtttgttttacggcaaccgaaagcagatggtgaagtcaagagtgaatactgaaggtggtggtgatgaaaggtttgctcgagaaagcgatgatggttggatggaggttgaattgggagagttcattagtggtgatgaagaagatgatcatcgcgaagtaaaaatgaggttaaggaaagtaaagggttatcaattgaagggagggcttaagaaaaagaaaaaaatgaacgtagatctgctgcctgaagattgttttgctcacattttatcatacacatctcctagagatgcgtgccggctttcgcttgtctcgtcgacggtacgatttgcggccgattccgacaatgtgtgggagaaatttttgccggttgattatatggaaattctcccaagattagtgttgccgctggtgtacttttctaagaaagagctgtttatgaggttatgtagcccagttctaattgaccaaggtaaaaagactttttccttagagaaatcaacgagcaagaaacgttacattctaggtgcaagagaactttcaattacgtgggcaaacaatcctctctattggacctggaaacccttccttcagtcaagatttacagaagtagccgaacttagaaccattagttggctacaaataactggtaaaataaacaccaaaaccatatcaccaaaaacacaatacgctgcctacctcatcgttaaatttgccgagagagctttcggattagactcgttgccatcagaagtatcacttgaagttggtaatggcagcttcaagtcacaagggacagtttatttgcgttggcaagaaagaaagaaacagttagaatgtctagggcatctgtactttttgcatcgcgatgaagctctgagatctagggtttccgaaggagatggtgaaaggtttgctagggaacgtgaagatggatggattgagattgaattgggaagtttttacaatgacggaggtgatggtaaggaagtggagatgtgcttgaaagaagtgaagggtcagcatctgaaagggggacttattgttgaaggaattgagattagacctaaagaatgagattaatgaatattgattgattttcttcttaatttgtttacacatcctatagagcgggacttttgtataaca

SEQ ID NO: 572 - DNA, 2206 bp, Citrus sinensis
gtcactgtcacagagtcacattatttatttatttattcttttaaatttcacacttcaattattaataatttcaatactgatataaataccaagattgccggatttatcgtgaagggatcacaagccataaagctaaaaccgccaccttcaacatcttcaattcacgcatttcactcccattttcaaccatttgattttgatcaccccatttgtgcgttaggctcctggaagtgaagcaagtgcaatggattcttgttgtgtgggcttgagagctaatacccatgtggtgaaagctagcaaatacggttcaaaaattggagataatgcgttgtggggagagaggatcagagggagtgtaagcaatgatggttgcactaagcagttgaaaaaaagtttgaaagctgaaaagagagatgagaaggtcaaacccggtgttgcttatgctgttatgacatcaaaacatcccaatgaggttatgaccttagcaccaccaaggcttgagagaagaagagtagatccgaaaaatgttgctgcgatcattttaggtggcggtgcagggactaagctctttcctcttaccttaagagcagcaacaccagctgttccagttgcgggctgttacaggcttatagacatccctatgagcaactgcatcaacagtggcataaacaagatcttcgtgttgacccaattcaactcagcttccctcaatcggcatatagcacgcacatattttgggaatggtatcaattttggggatggatttgtggaggttctagcagccactcaaacgcctggggaatctggaaagaattggtttcaaggaacagctgatgccgtgaggcaatttacatgggtatttgaggatgccaagaataggaacattgaaaatgtagttatcttgtgtggggatcatctttatcgaatggattatatggattttatccagagtcatgttgatagggatgctgatattacaatttcatgtgcagcagtaggtgaaagccgcgcatcagattatggattggtgaagatagacaatatgggccgcattgcccagtttgctgaaaaaccaagcggtgcaaatctgaaagctatgcaagtagataccagtcttctgggattctctcctcaagaagccaggaagtgcccatatgttgcatcaatgggagtctatgtatttaaaaaagatgttttatttaaacttttgaggtggagatatcctacatccaatgactttggatctgagatcatccctgccgccatcatggagcacgatgtccaagcatatatcttcagagactactgggaggatattggaacaataaagtctttctatgaagctaacatggccctcaccaaagagtctccagcgttccatttttatgacccgaagacacctttctacacttctcctcgtttcttaccgcccacaaaaattgataactgccggattaaggatgcaataatttcgcatggatgtttcttgagggaatgtactgtggaacactcaatagtgggtgaacgctcacgtttagattatggtgttgagctaaaggacaccgtgatgttgggtgcagactattaccaaactgaatcggaaattgcttctctgctagctgagggaaaggtcccaattggggttggacgcaatacaaaaatcaggaactgcataattgacaagaatgtgaagatagggaaagatgtggtcattgtgaacaaagatgatgttcaggaagctgatagaccagaacttggattctacattcgttcaggaatcaccattataatggagaaagcaacaattgaagatggaatggtcatatagatgagtctcatacctttcatgaactggtttaaaatggggattaatcaagcattggaaagccgtaatgtccgtggctgatgaggaagctatgaagatcacaagagcagcattttggcctggaaagaagcaagctgcgtgtttataccacatgtatattagaagctcctatcctatatgtataaaacgagcctaggacaacaatatatgcgagtagttttcaaataaaatcagtagactgattctgatcagttcactgcttttcttcctgtatagagcatcaaacttttggtataattaattaacagactatgctaaattgccttgtattttaccttatcatggtgctatatgagaaataatatatgtaatcttctcgtg

SEQ ID NO: 573 - DNA, 1643 bp, Citrus sinensis
cctcatcctccctccagaacttgcagcagcacaagcacaagcacaacgcacatacacacgtatacaatttctcttctctccggcttcgggtacaaaacttgtcgaattcgttgaattacccccctaccattcgcattcttcacaaaaacacaatgatctcttcagttaagcacaccccattttcagcatccacagatttcttgccaaagaaacgttttttaaccccaacgctaaagttctctccgctacccatcatccaaaattcaatctttaacaacaaattctcttcagaaaagcctcttcatatttcatcaactcaaaatctcacattttcgccaaaagagcaacaaaaagagcttaaaacacagtgcaatgcctatgaggctgacaggtcacgtcctctggacataaacatcgaggttcttgatgagcaggctcggtttgaggctgcccagaggctcaaaattggcatatatttcgccacatggtgggctttgaatgtggtgtttaatatctataacaaaaaagtgttgaatgcttttccttatccttggcttacttctactctttcactggcttgtggctctctcatgatgttggtttcttgggccaccagaatcgctgaagcccctaaaaccgatcttgagttctggaagagtttgtttcctgttgcagtggcacatacaattgggcatgtagcagcaaccgtaagtatgtcaaaagttgcagtttcattcactcacatcatcaagagtggtgagcctgcattcagtgtattggtttcaaggttcttgttcggtgagacacttcccatgccggtttatatgtcactcctgccgattattggaggctgtgcccttgctgctgttacagagctcaacttcaacatgattggatttatgggagctatgatatcgaatttggcattcgtgtttcggaacattttctccaagaaagggatgaagggaaagtctgttggtgggatgaactattatgcttgtttgtctatgatgtctcttttgattctcacaccatttgcaattgctgtggagggccctcagatgtgggctgctggctggcaaaaggctattgctcaaattggtcccaacttcgtgtggtgggtagcggcacagagtatcttctatcacttgtacaaccaagtttcatacatgtctctcgatcaaatttctccattgacattcagcattggcaacacaatgaagcgaatctctgtcatagtctcctccatcatcatcttccacacgccagttcaacccgtcaatgctcttggagccgccattgcaatactcggcaccttcatctattcacaggcaaagcagtgaaggattttgaggtggttttgccgcatagtctatgagttctgctggaactattcgcatcgaagtctgacagaagattgattagaaaaaaaaaaaaagacgctgctacagtggacggaatgatgcttttattccttgtaatcaagagtagtatctatattattctcatgatgcttgcagccagataagtgtacaaggttttttttcacccgagagcagattgtgggttaatgcctttgttgtaaataagaataaatgagttactgagctgtaatgatgttaatagagttatttattcattca

SEQ ID NO: 574 - DNA, 2115 bp, Citrus sinensis
ctatttcttatcttattatctggtttaaccagttgtatcactataatgtagaattactaatggtttaacactcgcaacttagcgtacgttcaacttcagaggcagaagttatttgcgttattccatcttctaccgcaatatcatgtgtaagtggatgtgatgtaattatcaacttctggtgtttcattaaagcgtgatgttagtttttgatgcacaataaaagcatgacaaagaagttctgactcaagttagtgttgcacaaataatatgaaatcaaatctagctcttttcacatagtacacaacgaatgagatagaattgggtgattcaaactcccaaacactctctcagtgaacgataggcaaagttagagattaggggtacaaaattgttactttcagttgccaatttgaaatgatgtgacactgttgatagaattctggaggtttgtctatggtctcagatttttaaacgaatatggatgaaggcaaaagctatgcatctatgtgaaagtttgacttgcatttccagattagcacaagggaaatgattctttccatattcacaaaaaatgattcttgtcatgtttgcatgtcatccactgtgtgaatgggagaaatttttgtcagctccatatctattgggaaattccaaaaatgggccaatgatctctaataaaagacaactgaaacaatcaccagacgatcaagacagacaaagaaaatgagtacgctaaagtcattctgcttcctctcttttcttcttgctatcttcctccctttcacatctccagccttattgttccagggatttaactgggaatcaagtaacaaggcaggaggatggtacaactctctgaagaactccattcctgatctttctaatgctggaattactcacgtctggcttcctccaccgtctcaatccgttgcaccccaaggatacatgccggggaggctatatgaccttgacgcatcaaaatacggatctcaagctgatttgaagtctttaattcaggcttttcgtcaaaagggaattaaatgccttgctgatatggtcataaatcaccgaactgcagagaggaaagatggtagaggcatatattgcattttcgagggtggaacatcagatgaccgtctggactggggtccgtccttcatttgtcgtggcgacaaggagtattctgacggccaagggaatgatgatacaggagaggacttccaaccagctcctgacattgaccatctcaacccgagggtgcaaaaagagttatccgactggatgaattggctgaagactgaaattggatttgatggatggagattcgattttgttaaaggatacgcccctagtatcaccaaagtttatatggaaaatacctccccagattttgcagtcggggagaaatgggattccctttcttatgggcctgatggaaagcctgatgctaatcaggatggacacaggggagcactcaaagattgggttcaagccgctggaggggctgtcgcagcttttgatttcaccacgaagggtatcctccaagctgctgtgcaaggggagctgtggagattaaaagactcgaacggcaagccgccaggattcattggaattttaccacaaaatgctgtgacttttattgacaatcatgacacagggtccactcaacgtctgtggccattcccatcggataaagtcatgcttggatatgcttacatcctcacacatcccggcaccccttgcatattttatgatcacttctttgactggggtctgaaggaggcgattagcaaattggctgctgtcagaaataggaatgggatcaatacagcaagcagagttaatattttagcctcagatgccgatgtctacattgctgcaattggtgatagagtcattatgaagattggaccaaagatggatattggaaatcttattccttctgacttcaaagtggctgccgatggaaccgactatgctgtctgggaaaaaaactgaactcaatgaagattttattttcaagttattagaataataatgttctgaaaggctattgtttaacacgtaaaagagctcttgtgagaataaaatgcaaatattctgtatttatgtaaa

SEQ ID NO: 575 - DNA, 1251 bp, Citrus sinensis
ataaaaaatcaaacattaattattatcatagcattaccgtcacttaccaaacatctttaggcaggctttactccttcactttcctcttcataaataacattgcatgtatagaagtcacagccagcaaataaaacccaattaatttattaagataaataatcatctgaaaaatgaaggcttgggtttacaaagaatatggaaactctcaaagtgttttgaagtttgaaacaaatgttgaagttccaagtttgagggaagatcaagtgctgatcaaggttgtagccgcggctcttaatccaattgatttcaagaggatgcttggggcattcagcgcaactgactctcctttgcctacgattcctgggtatgatgttgcgggtgtcgtggagaaagtgggaagccaagtaaagaagtttaaggtaggagatgaagtttatggagatataaatgagaaagcattggatcatcctaaacgaaatggctccttagctgagtacactgctgttgaagagaatctattggctctcaagcccaaaaacctgagttttgttgaggctgcaagccttccccttgccactgagactgcctatgaaggtcttgaacgttctgccttttccgccggtaaatctattcttgttttaggtggagctggtggagttggcaccatggtgattcagctagctaagcatgtctttggtgcatctaaagtagcagctacctctagcactgcaaagctggacttgttaaggagcttgggtgctgatttggctattgattacaccaaggaaaacattgaagacctgcctgagaaatttgatgtagtgtttgatgcagttgggcaatgtgacaaggcattgaaggcagtgaaagaaggcgggagagtcgtttcaattattggttcagtaactccaccagcttcctcgtttgtgttgacttcggatggatctatgttggagaaattaaatccttatttggagagtgggaaagtgaaagcaattattgacccaaaaggtccgtttccattctctcagaccttagaagcattttcccaccttgaatccagcagagctactggaaaagttgtcatacatccaatcccatgagcggaaaacaaatgaatgctggatataatgtgtgtgactacctaaattatgtaatcgattagactatatgcttggcaataaataagagtgtggtcaattaattgtaagactaaaaagatgcttaagggagttttaatattctgttttc

SEQ ID NO: 576 - DNA, 6471 bp, Citrus sinensis
taaccagtggagtgctgccgctgctttctccgtttctattgtttataactttttatgtactggcatgcatgagtttagactccatagactactcagtttctttcttatctcattccatttccagctctcaagcaatcattcatccctttgtgaaaatggtctgacttgatgatcaattatgatcatcatgaagacatcacatcgcatgatcttttaagctgttctgttctataattaacaggtgaacaaggtagttttaagtagaattatcatatttatagaggcaaaagatgtcacagagaaggggctctgaccaacagccacagccgcagaggcggattctgcggacgcagaccgctggtaacctcggagaggcaatgatggacagtgaagtagtgccctcttcactggttgagattgcgccaatcctccgagttgccaatgaagtggaggctagcaatccaagggttgcttatctctgccggttctatgcgtttgagaaagctcacagattagatcctacatctagtggacgtggtgttcggcaatttaaaactgctcttcttcaacgtctggaaagggaaaatgaaacaacattagcaggaaggtcaaagagtgatgcccgtgaaattcagaacttttatcaacattactacaaaaagtacattcaagctctgcagaatgctgctgacaaagccgatcgtgcccaacttacgaaagcatatcaaactgcggcagtcctatttgaagttttgaaggctgtcaatcaaacagaagctgtggaagtagctgatgagattctggaagctcacactaaggtagcagaaaagacacaaatatatgtaccttacaatattcttccccttgatcctgatagtcaaaatcaggctatcatgagatatcctgagattcaatcaactgtttccacacttcgcaacaccaggggtttgccatggccaaagggtcacaagaagaaaatagatgaagatattctagattggcttcaagctatgtttggttttcagaaggacaatgttgcaaatcaaagggagcatttgattctgttgcttgcaaatgtgcacttacgacaatttccaaaaccagatcagcaaccaaagttggatgatcgtgctctgactgaagtgatgaagaaacttttcaagaactacaaaaaatggtgcaagtatctggggcgaaaaagtagcctttggctgccaaccattcaacaagaagtgcagcaacgcaaattgctatacatgggtctttatcttcttatatggggagaagctgcaaacttgagattcatgccagaatgcctttgttatatatatcatcatatggcatttgaactgtatgggatgctggctgggaatgtcagtcccatgacaggtgagcacataaagccagcctatgggggggaagaagaggctttcttgtggaaagtagtaaagcctatctatgatacaatagcaaaggaagctagaaggagcaaagatggaaaatcaaagcattctcaatggagaaattatgatgatttaaatgaatacttctggtcagttgattgttttcggttaggttggcctatgcgtgctgacgctgatttcttttgccagcctattgaagagattagagttgacaaagatgatgaaaagaagccagttactggtgacagatggatcggcaaaattaactttgtagaaatacgttccttttgtcacatcttcagaagttttgatagaatgtggagcttttatatcttatgtttgcaggctatgattatcattggctggaatggatccggaaagttgagttctatatttgatggagatgttttcatgaaggtcctgagtatcttcattactgctgcaatactgaagcttgcacaagctgtcgtcgatatagtactaagttggaaagcaaggcgaagcatgtcattttatgtgaagctaagatatattctgaaggcagtttcagctgcaggatgggttgtaattctaccaataacttatgcatatagtttgaaaaatcccgctggatttgcacagactataaagagttggtttggaaatagtccaagttcaccttccttatttgttacagccatccttgtatacttagctccaaacatgctctctgtactgttgtttctgttcccattcattcgccgctttcttgaaagatcaaataataagattctgatgctcataatgtggtggtctcagcctcgactctatgttggaaggggaatgcatgaaagttcgatttcactattcaagtatactacattttggattctcctaatagcatcgaaattagccttcagttattttgtagagataaagcctcttgtgggtccaaccaaagctgtaatgcaagttcacgtaagaacctttcagtggcatgaattcttccctcaagcgaagaataacattggcgttgtgattgcactttgggctccaattgttcttgtatattttatggatactcagatttggtatgctatattctccaccatatttggaggtatttatggtgcttttcgccgcctcggagagattcgaacactgggaatgttaagatctcgatttcagtcactacctggtgcttttaatgcgtgcttgattccagtagagaagaatgagaagaccaagaaaaagggattaaaggccactttttctcgcaaatttgatgaggtcacgactaataaagagaaggaggaagcaaagtttgctcaaatgtggaacaaaataatcagtagcttcagagaggaggatctaataagtaatagggaaatggacctgttgcttgtcccctattgggctgaccgtgatttagacctcatccaatggcctccatttttacttgctagcaagatacccatagcattggatatggcaaaagacagcaatggaagagaccgtgaactcaaaaagagattgaattcagacaattatatgcatcgtgcagttcaagagtgctatgcttcttttaaaattatcattaacgttttggttctgggagaacgagagaaagaggttattaatgaaattttctccaaagttgatgaacatatacgtgaggacaatctgttaactgaactgaatatgagtgcacttcctagcctctatgaacaatgtgttgagcttatagagtgcctgttggcaaataaaaaagaggacaaggatcgagttgttattgtcttgcttaacatgctagaggttgtgaccagagacataatggaggatgctgttccaagtctgttagattctagccatggtgggtcctatggaaaaaccgagggaatgacaccccttgatcaacaagttcatttttttggtgcacttggatttccagtttacccagaaacagaagcctggaaagaaaagatcagaagacttcatctattgcttactgtgaaggagtctgcgatggatgtcccatcaaatctggaagctataaggcgcatttctttcttctccaattcattgttcatggacatgcctagtgcaccaaaagttcggaatatgctttccttctcggtcctaactccctactattcagaggatgtattgttttccattaatggcctggaaaagccaaatgaagatggagtttccatccttttttacttgcaaaagatctttccagatgaatggatgaactttcttgagagggttaattgtagtagtgaagaagaactcagagcaagcgaagagttggaagaagaacttcgtctatgggcttcttatagaggccaaacattgaccaaaactgtacggggcatgatgtattaccgaaaagctttggaactccaggccttccttgatatggcaaaggatgaagaattaatgaaaggctacaaggctgctgaactgaatagtgaggaacagtcaaagagtgaaacatcactgtgggcacaatgtcaggcagtatctgacatgaagttcacttatgtggtatcatgtcaacagtatggcactcacaaacgttctggtgatgctcgtgcaaaagatattctgaggcttatgacaacatacccgtcccttcgtgtagcttatatcgatgaggtggaagaaactagcaaagataaaaccaagaagacagttcagaaggtttattattcagctcttgcgaaggctgctgcacctaccaagtctattgattcttctgagactgttcaaactttagaccaagttatttatcgaataaagcttccaggaccagcaattttgggcggggggaaacctgaaaatcaaaaccacgcaattatattcacacgtggagaaggcttgcaaacaattgatatgaaccaagacaactatatggaagaatctctcaagatgaggaatttgcttcaagaattccttaagaagcatgatggtgtcagatatccaacaatacttggagttagagagcatatattcactggcagtgtttcatctcttgcatggtttatgtcgaatcaggagactagttttgtaactatagggcagagattgttggctcaccctttgaaagtccggttccactatggtcatccagatgtgtttgatagattgtttcaccttacaagagggggtgtcagcaaagcttccaaagttattaacttaagtgaggacatatttgcaggtttcaattctacactacgtgaaggcaacgtcactcatcatgaatatatacaagttggtaagggaagagatgtaggtcttaatcaaatatctctgtttgaggcaaagatagctaatggtaatggcgagcaaacattaagccgtgacatctataggcttggacatcgatttgatttcttcagaatgttgtcatgctatgtcactacgattggtttctatttcagcactttgctaactgtgctcacagtgtatgtgtttctttatgggcggctttatcttattctcagtggtcttgaaaaagggttgagtacccaaccagctataagagacaataagcctcttcaagtagctcttgcttcacagtcttttgtgcaaattggatttttaatggccttacctatgatgatggaaattgggttagaaaggggcttccgcaatgcgttaagtgatttcatattgatgcaattacaacttgctgcagtatttttcacattttctctaggtacaaaaactcactattatgggaggacattgctccatggcggtgcagaatatagaggtacaggtcgtggctttgtagtgttccacgccaagtttgctgaaaattatcggctttactcccgcagccactttgtcaaaggaatagaactgatgattctacttcttgtgtaccatatactgggtaattcatatagaggtgtagttgcatttttgttgatcactgtatcaatctggttcatggtggggacttggttgtttgctcctttcctcttcaacccatcaggctttgagtggcagaagattattgatgactggacagattggaataagtggataagcaaccgtggaggaatcggtgtacctccagaaaagagttgggaatcctggtgggagaaggaacaacagcatctcctttactctgggaaacgcggcatcattgttgagatattgttgtcattgcgcttcttcatgtatcaatatggtctcgtttatcacttgagctttaccaagagtacccagaactttctggtttatggtgcttcatgggttgtgatcattttcgtattgttgctggtgaagggaatgtctgttggaaggcgacgattcagtgcaaatttccagcttttgtttagaatgattaagggtttggtattcatttcatttattactatcttcatcattttgatagcaatccctcatatgaccttcaaagatatcttgctgtgtatactcgccttcatgccaacaggatggggactactactgatcgcacaagcttgtaagccattgatgcaacgtggtggaatttgggaatcaattaagacacttgctcgtggttatgaaatagtgatgggattacttctattcaccccggttgcattcttggcgtggttcccatttgtttcagagtttcaaacaagaatgctattcaaccaagcattcagtagaggtttacagatttctcgtattcttggaggacagaggaaggagaaggacaggtcttccaaaagtaaggagtgaataaatgcatgcatacatagatatatctctcatcccagtcaatcaatcaatcaatcttgtaatttgtatgtgtgtgtgtgtgtgtatccacacccacaggatgatcacatgctgcacaagtgtttatattataattataatatcataaacgagagttctagtactcctagctagcatggaaaagtagatacatatataaccttttatcctttacaactaatatagttgtatgtatatgtatagctgaaatgactttatcccgtgttgataaataaaaaagctcgttaccttgaaatcatcagaagaacaccaaggaaataaa

SEQ ID NO: 577 - DNA, 617 bp, Citrus sinensis
gtgaaagcggtggcggtgatgacgggaactaacggtcgcaagggaactgtttcctttagcgttgaaggaagtggtccaacaactgtgaaaggaagcctctctggtttgccgcctggtgatcacgcactcattattcacacttacggaaacataagcaatgattggatatcaactggacccccttttaaacctgctggagctgacggttttttagaaaacatcactgttactagtgagggtattgctacttttgaaatttacaagacgattcctctttctggaacaaattccgttattggaaggggtcttgtagtccactcaagtcccagtccagatcctggtgatggagtagcttggggcaccatcggtctcagttattgaaggggcttctctccataccataataaatacatttgacatgatgtcgaatgtgtcttgaatacttaataaaataaataatatgttgtacgaatcaaaatctggctataataaaataaataaaagccagggcatgtctgtaatatgttgtacctgtagaatgtggccgcaaataaaataaataaaagtccaggcgtgctgtgcactgtccttaagactatttctactccttaaaaaaa

SEQ ID NO: 578 - DNA, 1411 bp, Citrus clementina
atggcaaccttcttgagttgtgcattcattctcttctttctttttttttatgtagtctctccaatagaagctcaaactggaggtttcagtgttgagctaatccaccgtgactctcccaagtctcccttttacaactccagtgaaactccctaccaacgattgagaaatgcttttactcgttctaccaatcgtcccaatcactttaatcagaactcatcaatatcttcatcaaaagcttcccaagctgatataatacccaatatcggagactatctcatacgtatatcaattggtactcccgcgactgaaatactagcagttgctgatacaggaagtgacctcatatggacgcagtgcgagcctcgcccaccatcacaatgttacatgcaggactctccactttttgatcctaaaaagtcatctacttacaaatctcttccatgctcgtcaagccaatgtgcatctcttaaccaaaaatcttgctctggggtaaattgtcaatactcggtctcttatggagatggatccttctcaaatggcaatcttgctaccgaaactgttactctgggttcaacaacaggacaggccgttgctctgcctggaataacctttggttgcggaacaaacaatggtggcttgtttaattcaaaaacaaccggaattgttggccttggaggcggcgatatttcacttatttctcaaatgcgatctacaattgctggtaaattctcctattgtttggttcaggcaagctcaaccaaaatcaattttggaaccaatggaattgtttcaggtccaggagtggtttctactcccttgactaaagccaaaaccttttatgttctcacaattgatgcaatcagtgtaggaaaccaaagactaggagtatcgactccagacattataatcgattctggtacaacacttaccttattgccacaacgttataactcaaaattgttgtcagtaatgtccagtatgattgaggcacaacctgttgcagaccctaaaggatcatttgaactttgctacagttttaattcactatctcaagttcctgaagttacaatacatttcagaggtgcagatgtgaaattgagtccttccaacttttttgtgaaggtttcggaggatattgtatgttctgtttttaaaggtaccaatagtctgccactttatggtaatataatgcagactaactttttggtcggctatgacatagaacaacaaactgtgtcatttaaaccgacagactgcaccaagcagtaattaattgggaagcttattcgatattctcccctctactagagtttgatcgagtgattttcaagccactttctttagccgatcaaccgatttcaaattctaatgcgattggagctgaataaaatctatttaaataaatctattt

SEQ ID NO: 579 - DNA, 699 bp, Citrus clementina
atgaagacttccttagtaacaacactctccttccttatacttgctttggccacaaaacctcagttgggcgcctcagaatctgaacctatcttagatgtctatggcaaccaggtggactccagccacaggtattatcttgtctcagcactctggggagttaaaaccggcggtggaattagcgcggacaaaggcaaaaatggacagtgtccaacggatgttatccaattacgtcctaaggacaaaaggggaaagaatttagttttacttccgtatgataattccacaattgtccgggagtccactaatattaaattgaaattctcaagagtttcttctcttcagcagtgtaacaaagattcgttgtggaaagttgacaacgataacgcttcattaggaaagcagtttataacaatcggtgaaggtaaaacgtgtcaaaatttgtttaaacttgagaaagttagtgcatcaatatttgatatgaaaatagcactagacattccctgtctatacaaaattgttcattgttcaacacctgttaatggttcttgcgatacactctgcaaagacgttggcgtttctaatgtggatggcgtccaacgtctagttgtggttgatgataatgatcagccaaatctgcctttgcctgttgtgttatttccagctgatagtggaagatctatgttatttccgtctctgtaa

SEQ ID NO: 580 - DNA, 1203 bp, Candidatus Liberibacter
atgagtcgtcttagaaccatgaatgatcttcgtgatataagggggcttcgttgtttgttgcgtgttgattggaatgttccatttatagatggaaaagtcgcagatgttactcgtattgagcgtgtagttccaacaattcttgagcttgtagaaaagaaagcaaaagtcgttattttttctcatttaggacgtcctcaaagtaaatcagataaagattgttctttatttaaagtggtctctatcgcggagtctattcttcacaaaaatattctttttgttaacgactgcattggttcaaccttgtcgcaatcaatcgcttctttgtcagaagggggcattattcttgcagaaaatgttcgtttttattcggaagaagaaaggaatgatccagattttgtaaggatgttgtcgcgaaatggcgatttttatattaatgatgccttttctgtttctcatcgggcacatgcttctattacaggtctttctcatttattgccttcctatattggtcgtgccatgcaaaaagagcttagtatgctagaaagttgttttagtgaatctaaaaaacctttagttgcaatcgtgggaggctctaaggtttctaccaagatcacgttgctcattaatctcgtaaaaaaagttgataagttggtgattggtggtggtatggccaatagttttttagtagcacagggcatgggagtaggtcgctcgttgtgtcaacgtgatttttctgacaatgtacaccagatagcatgggaagctaaaagatctgcttgtgaaattattgtgccacgagatgttgtcgttgctagagaaatgaaaacaggaattcccacacaagttgtttcagcgcaatctgtgcctctggattctattatattagatgttggttttaagacagtagaatatattaaacaggttattgcgcaagcaagaactgtgatgtggaacggcccacttggtgtttttgaaatagagcctttcgatagggctacggttgaagtagcacactatgtagccaaactaacaaaagaaagaagaattatttctattgcaggagggggggataccatcactgcacttgctcatgcgggtatttcgaatgaatttacatatgtttctacagctggaggggcatttcttgagtggttagaaggtaaggatttacctgggattgttgcgctatctggtcattgctga

SEQ ID NO: 581 - DNA, 20 bp, Artificial sequence
  Single strand DNA oligonucleotide
agattagtgttgccgctggt

SEQ ID NO: 582 - DNA, 20 bp, Artificial sequence
  Single strand DNA oligonucleotide
gaaggaagggtttccaggtc

SEQ ID NO: 583 - DNA, 20 bp, Artificial sequence
  Single strand DNA oligonucleotide
cattcgttcaggaatcacca

SEQ ID NO: 584 - DNA, 20 bp, Artificial sequence
  Single strand DNA oligonucleotide
cttctttccaggccaaaatg

SEQ ID NO: 585 - DNA, 21 bp, Artificial sequence
  Single strand DNA oligonucleotide
gcttacatcctcacacatccc

SEQ ID NO: 586 - DNA, 22 bp, Artificial sequence
  Single strand DNA oligonucleotide
ccatctttggtccaatcttcat

SEQ ID NO: 587 - DNA, 17 bp, Artificial sequence
  Single strand DNA oligonucleotide
ttcgtgtggtgggtagc

SEQ ID NO: 588 - DNA, 17 bp, Artificial sequence
  Single strand DNA oligonucleotide
gagcattgacgggttga

SEQ ID NO: 589 - DNA, 20 bp, Artificial sequence
  Single strand DNA oligonucleotide
gcttaggccaaggaagtttg

SEQ ID NO: 590 - DNA, 20 bp, Artificial sequence
  Single strand DNA oligonucleotide
tctatccccatcacgatgaa

SEQ ID NO: 591 - DNA, 20 bp, Artificial sequence
  Single strand DNA oligonucleotide
ctatggcaaccaggtggact

SEQ ID NO: 592 - DNA, 20 bp, Artificial sequence
  Single strand DNA oligonucleotide
atcggataacatccgttgga

SEQ ID NO: 593 - DNA, 20 bp, Artificial sequence
  Single strand DNA oligonucleotide
ctggaactaacggtcgcaag

SEQ ID NO: 594 - DNA, 23 bp, Artificial sequence
  Single strand DNA oligonucleotide
aagtgtgaataatgagtgcgtga

SEQ ID NO: 595 - DNA, 21 bp, Artificial sequence
  Single strand DNA oligonucleotide
ttttgtgaaggtttcgaagga

SEQ ID NO: 596 - DNA, 20 bp, Artificial sequence
  Single strand DNA oligonucleotide
tggtgcaatcagtcggttta

SEQ ID NO: 597 - DNA, 20 bp, Artificial sequence
  Single strand DNA oligonucleotide
accagcttcctcgtttgtgt

SEQ ID NO: 598 - DNA, 20 bp, Artificial sequence
  Single strand DNA oligonucleotide
tcaaggtgggaaaatgcttc

SEQ ID NO: 599 - DNA, 20 bp, Artificial sequence
  Single strand DNA oligonucleotide
ttcctcttcaacccatcagg

SEQ ID NO: 600 - DNA, 21 bp, Artificial sequence
  Single strand DNA oligonucleotide
tccaatctgtccagtcatcaa

SEQ ID NO: 601 - DNA, 22 bp, Artificial sequence
  Single strand DNA oligonucleotide
aaattagcagcagatgttccag

SEQ ID NO: 602 - DNA, 22 bp, Artificial sequence
  Single strand DNA oligonucleotide
tcccacgattctattttgcttc

SEQ ID NO: 603 - DNA, 22 bp, Artificial sequence
  Single strand DNA oligonucleotide
aatggaaacagcatctcacaag

SEQ ID NO: 604 - DNA, 22 bp, Artificial sequence
  Single strand DNA oligonucleotide
ttgaagatatgcattgacaacc

SEQ ID NO: 605 - DNA, 22 bp, Artificial sequence
  Single strand DNA oligonucleotide
aacaaagccgcaagtataccac

SEQ ID NO: 606 - DNA, 22 bp, Artificial sequence
  Single strand DNA oligonucleotide
tgaggaacttatggaagcgacc

SEQ ID NO: 607 - DNA, 22 bp, Artificial sequence
  Single strand DNA oligonucleotide
gccaaagcttgagtaccatagg

SEQ ID NO: 608 - DNA, 22 bp, Artificial sequence
  Single strand DNA oligonucleotide
ctgtggaagaaggctttacagg

SEQ ID NO: 609 - DNA, 22 bp, Artificial sequence
  Single strand DNA oligonucleotide
aaatgtgggtgaatgagaaagc

SEQ ID NO: 610 - DNA, 22 bp, Artificial sequence
  Single strand DNA oligonucleotide
attattgttgcacgtcaccttg

SEQ ID NO: 611 - DNA, 20 bp, Artificial sequence
  Single strand DNA oligonucleotide
tctcagaagacgaagcgtga

SEQ ID NO: 612 - DNA, 19 bp, Artificial sequence
  Single strand DNA oligonucleotide
cggagagcctcattgtcct

SEQ ID NO: 613 - DNA, 25 bp, Artificial sequence
  Single strand DNA oligonucleotide
aaccatattgacagaaatgctgata

SEQ ID NO: 614 - DNA, 20 bp, Artificial sequence
  Single strand DNA oligonucleotide
cagcccaaaatctgatgctc

SEQ ID NO: 615 - DNA, 19 bp, Artificial sequence
  Single strand DNA oligonucleotide
gagacgcgaaattcaagca

SEQ ID NO: 616 - DNA, 21 bp, Artificial sequence
  Single strand DNA oligonucleotide
gcagcaaaaacttcatcttcg

SEQ ID NO: 617 - DNA, 19 bp, Artificial sequence
  Single strand DNA oligonucleotide
ggtcgtgctttcggcttag

SEQ ID NO: 618 - DNA, 20 bp, Artificial sequence
  Single strand DNA oligonucleotide
tttcgattcgtggtcaccta

SEQ ID NO: 619 - DNA, 19 bp, Artificial sequence
  Single strand DNA oligonucleotide
ccctttgctattgctgtgg

SEQ ID NO: 620 - DNA, 19 bp, Artificial sequence
  Single strand DNA oligonucleotide
ccaatttgggtgactgcat

SEQ ID NO: 621 - DNA, 20 bp, Artificial sequence
  Single strand DNA oligonucleotide
tctatggccctcaagaatcc

SEQ ID NO: 622 - DNA, 20 bp, Artificial sequence
  Single strand DNA oligonucleotide
tgccattgagatgaccaaga

SEQ ID NO: 623 - DNA, 347 bp, Citrus sinensis
gaggcctcgtgccgaattcggcacgaggctgtactatgttgaccgagatgatccagatttgaaaaggtaccctaagctctccgcacattggtattcacagttcctgaagggaagaagcctaagttcagacgaagatttcgcactcgagaaaaatttctcaggtccttcttatggtcatgactatcagtaggcaaagatccatttacataaaggattgcatttttctttttgaattagattccttaccttcttgcgatccactccactgtgagaatcaaattttacaattacagtaccatgatcaataaagttttcttttttaattaaaaaaaaaaaaaaaaaaaaaa

SEQ ID NO: 624 - DNA, 696 bp, Citrus aurantium; identical to SEQ ID NO: 284

SEQ ID NO: 625 - DNA, 547 bp, Citrus aurantium
ttttaatgcttaaattttccttttatatacctattattattcacctgtttacactgatcaccaacttacaatcaaaatcaaatcattcaaccttccaaatgatacatcatccataagaattcaagcctcggtaccatgtaggtcaaggaatattgcgccatagcacaaattatcggccaccggaatgagtaactgctgtgctgttcatataaccagccctgtcatgggtttatggtgaataagtatgtaaaacaacccgagtttttggccattcatgaatcctctccactaagatctccccatcgaacattgtgcttggcagcaagataatgtgctccaactggtcctcggctaccataaggatagagctctggaacaatcttcttctcttcaagttccttcagtaatggtgtaaacaacgcccaggcggcatcaagctcatcactccgaataaacaacctccgttcaccttctattgcatctaagaccagcctctcatatgcatctggtatttctgttggatgacgcctgagcaccagatttcatc

SEQ ID NO: 626 - DNA, 845 bp, Citrus sinensis
tttttttttttttttctataacttgttcagttgaactttttcatctcatgaaagtggcgacagccctcaaagcccttttacaaaactgtaaaacagaacttaatatttcattatacaaggtaaacactaatgtctcaactccaaaccattattgaaaatagcgcatgctgcatatactgccaacctatgttatttcctaagtaatatcttgggttgtggaaaattacaggaacatgtttgcggtccaaaataaaagtggagatttttgtagcctcgatcaaggagtggccacattttccttggcaagaggagcaatttcttcgccgtcaattccaggttcactaccagcaacttccaggttaagtagggtctcctcccatttcttagctggtcctttccatgaaagatcttgagccatgccatttttcatcatttcagccaaagcttgagtaccataggttgcaagagctcttctgacggttgtggacactgcatccacatctactggatccacagcctcacagtcaacactgaagcttcccatctggaatcctgtaaagccttcttccacagtgtcaaccaaaccaccagtggaagccacgataggtacggttccataacgcatggcatgtaattgaatgagaccacaaggttcaaatctgcttggaatcaaaataaaatcagctcctgctattatcatatgcgccagaggaatattgaatttcgctactcctctggctttctcagggtacagtatctccaactgttcaagctgcttctccattggttttttgccagtaccaaggactattatctgaacattctctttgatgaaatggggaatg

SEQ ID NO: 627 - DNA, 840 bp, Citrus trifoliata
tttttttttttttttttaacatttaagagaatcaatatcatgaagtaataatatttatcaatggtcttaggatccacaaagcttttaaaacttttacatcaaatttgtgacatatgagccaggatattattcaagccttaaatctaatagatacttactatgttacggatatcagcagctaaaaacactggttggtccagaagctccatcttcatttggtcggaatgataagattttctcagctaaatcattcaatgaattgtagcaagaaccaccttctttcagagacagctccaccttctccttcaaatgtgttgcctttttcctcatctcttcgccttctgtatctaccatgagtgtttttatagctttctcaatcttccctctctcgaactcctccaattccaagcctacattccaaacgtcacacacatatctcctgtttacgttttgatccccggaaaatgggctgcacagcattggaatgccttcgcaaatgctttcgagagtagaattccagccacaatggctccaaaacccacctacagcatcatttgctagcacctccttttgcggtgcccattccacaatgcaacccctttctccaacactatcttgaaaattaattggtaatagttccaagcaattcgagccacgaaccaaacctggcctaaccacccacaagaaaggttgctcacagtttgccaggccccaagctgtttcaagcagctctttctcgtctatgctagctacgctgccaaaacttacataaatgacagactttggagcttgcttgtttagccaagaaatgcaatgactgtcttcctttagtaatgaact

SEQ ID NO: 628 - DNA, 849 bp, Citrus trifoliata
tcacattactaattgatatttgggctaatcatttgggctcaattgatatttcaataaacaatagcaaggcccattttctacataaaaacaccagcaactgcaagcccacattattatttagcaaaagctgcatatacaactcttaatcacattactaatttaacaaccaaactggctatagattttacaagatttgccctcaaaacggagaggtaactctcctgggacttaatccagtcctgagaaaacttgcactgatgaaatggaaaagccaatccatatttccaaaagattgatatctaaaagttgtcctaacacagccatgtgagggcaatttattagcgctgcaaatctagttgcttatttgattgattactctaattttgccataacatgctcctcacttgaacatagagaatattttgccaaacaaagccgcaagtataccacgagtaccaccaacattcatgtcagtttcctcatcccatgggaacggcggcagtttcttggttgcttccataagttcctcatttgaaaactttagctttgaacgttcaagtggattaatttcatgattgtacttttgcgggtctggacagtaatcttgatctgcatgcattttcttcacaaaaatcttaaatatcttgaagttattttctgctaacaggtcatctgataatcgaagatatgtcaccccatacatcctaagttttggtggcccttctttgttgacaccatttggcctagcatttaatagaatttgattgtacgctgtagcatcatatcttgaaagtgcattttcccctgcaacttcaatattctctctccaccctccactaaaacctgctg

SEQ ID NO: 629 - DNA, 734 bp, Citrus sinensis; identical to SEQ ID NO: 296

SEQ ID NO: 630 - DNA, 570 bp, Citrus sinensis
agagtactatcgccacctcgcacgagtgtggtttactatagagtagaagaaagccaagaagggcacaacaatagtgagccagtgaatgttcaaggaaaattagcagcagatgttccagctgagctggaaagtcctgaatcatcagccaccctggcagcagatgatgttgatgatgttactgcaagaaagattgaagatcagaagcaaaatagaatcgtgggaggggagtccaatgtttaatatgcaaaactcagctgttcataggacagctctgtgaaataatagggaatttatcactgaatcctctatgggttgtaaattctgatatctgcatttgaaatcattctcttgtgtgtgtgtgtgtgtacatacatatagggtgtaaaagcgaatccggttgtgctttggacgggatatttttgcaagagtcaatggattttgattgttgagaagtcaggatgcgcataaaatttaacatttggatggtctagttgtctgaagcattccttctggttctggattgcgaataatatgatctcagctctatttgtccaaaaaaaaaaaaaaaaa

SEQ ID NO: 631 - DNA, 828 bp, Citrus sinensis
gaataatctcttcatcttcttcttggtcttcttctacttcttcttctacttcttcttgttcttcttcgtaattacgcttaacgagagaattagaattggaatatcgtttcggtttttgataattaaggatgccaggtggtggattctcggcgtccgtgccgccggccggagtcgagtttgaggccaagatcacgccgattgttatcgtttcatgcataatggccgccactggaggcctcatgtttggctacgatgttggcgtttctgggggagtgacggcgatgccacacttcttgaagaagttctttccagtagtgtataggaggacacagcaaggggatgatagcaattactgcaagtacgataatcaagggctacaattgttcacatcatccttgtacttggccggcttaactgccaccttctttgcatcatacacaactaggaggcttggcaggaggctgaccatgctgattgctggtatcttcttcattgctggtgttgcctttaatgttgctgcccagaaccttgccatgctcatcgttggaaggatcctgcttggttgtggggttggtttcgctaatcaggctgtgccattgttcctatcggaaattgctccaacaaggatacgtggagggcttaacatactctttcagcttaacgtcaccatcggcattcttttcgccaacttggtcaattatgggacctcgcacataaaaagccaatggggttggagaatatcactgggcttggctggcattcctgccgctctcctgaccgtgggatccctcctggtgacagacactcctaatagtcttattgaacgcg

SEQ ID NO: 632 - DNA, 767 bp, Citrus sinensis
tttttttttttttttttgtaccaaaaaagttatattgctccgaaaagtttgcacttacagatatcattatcaaaccgaatgatttctcttttgaaacatcccttgttgcacatagcaggccaaagctccagatcgaacactctctcaaaggattgtacactaatttcttcatgacacaaaaaccgccaccaatatatttcttacctaacgtatacgtattaattctattatagcaacatcattatttaaagccttcttaaatttacaactgggaaacggggtcaaacccattgcgatgcccatttttcttcggttcatcatcatcaaaaccatcgtcaaccataaaattcttccacaaccaatgctgcttccacactctctcagtcatctcttcaatcggcacattctttgtctcggggagcaagaaaaacacaaagcatgacatgatcaaaacccaaccggaaaagaacaagaaaatgccgaacttgaaatggcagagcattgaaaggaatgcctgagctatcacaaaagtgaacagcaagttcacacaaacagtaacactctgtccagctgatcgcgtctctaacgggaatgtttcgctgggaatcagccatccgagaggtccccaagaccaagcaaaggcagagatgaaagtgcaaatcataataaccactaggacggcaaagccagtgtgtaaatcttccgagtgatccttaaccttaattccaagtatgattgctatcacagtctgagacaagaacatttga

SEQ ID NO: 633 - DNA, 688 bp, Citrus trifoliata
gatatcacttcgttgagaaagaagtaaagtagtaaacagttacatatattacacacacccatcattattgcatgtaacattataacttctcagttcttatctgccttaatatttatttattcaccgctcaaggacttgctctacacacacacacacacacactctccacgatttctctcatacgcatattgccataattacatcaccatcattatcaaaatgattaatcttcaatcccatccaagcaaggagtaaagaagtaaatgtcatcaagcctatcattacttggagaattaccaccgtataccagtagtccatgttttccacccctaagcccaccagcaaatgcacaccatccgcgaggcccgggatgatgatctgagccgggcccatcatcccaccgtgtccacaccaatgtctcagtgcccaatgagtaaagttcaccggcgaattttccggccccaaggtggcccaagtcactggggtctacttctccgccgtagacgattatttgttttccgatcccaacagtagaaaatacgctccgagctgttggtttttcgccgctcgtctctacttgggcccattgtgcatgggctggatcaaagcaatgcacatcatccacttccactccagcgaaaccatacacaacccataacttcccttgggtcactatcaacccggcctc

SEQ ID NO: 634 - DNA, 432 bp, Citrus trifoliata
tttttttttttttttttctttcaagattgctaaaaaatttcaattgccaagttgggaagaaattgaaatgtgccgatatctactaccccccaagtagtttttgcatttcacaaaaagtgaaaaaatgttcatgtaaatgtaaacaggaaaccgagtagaaaaaaatggaaacagcatctcacaagccagagagggatgcagttgtgagtgcaggtggtgttggggcaaaagattcatcatctgtccagtttgtttcgccccagtgccgtaacatgctcttccatttgcataggttgtcgatgcatatcttcaaacgcccatcctcgactttgatcttgtaatgtccatctgtgtagttagccatttcagcttgcctcctgtcaaattctagttgtgccttttgcttagacctcaacaagcaaaactgccctc

SEQ ID NO: 635 - DNA, 945 bp, Citrus trifoliata
aattaatttaaatcaacaaattgctgtcccgacataagaatacacgctcctccgtaggacacaaaggaatattcagcttcttgaatctgtaatcatttacattatgaatggctatgggaacttttagtacaaaaatatttttcaaggtcttccacttcactctaaatctctaattcaattaccaaaacaagcaaagaatgaagctcttcctgtcactcattgcgttgtcaaagaaataccattataaaacctgaaatcttcatgcctatgcctatgagcggtactcacctccagggaactcaatcccgctctttctggaaactaggtaaacatttccattcctttcatctatcaaagaataaaaaatcagttcaccagattcgtcgtggatgttgcttctctgtaacccaataagcttggttaagctggaagaaaaattatcagcaaccagaaaagagacatccatacattcatgcttcttgaaccaaaattttccatcgacttttaggagtaaaaccttaagtaccagcatttcaaggatgtacattgcactcactcaatagctgatcttcttggttcaaaaacttcttccagaattttttatatcttggaattcccagctccagccaaggtttcatgtgtccattatagtgcaaaactgcagctttctttatggcttcgatattaagcccataatcatgaccaagtcctgacaatgcccacaccccatcaagagcataaacaaggtcctgaaaggtgagcaaacttccacgcaaagcaacagcttcctttgattcctctcccatgctgacctctcttaccaacctctggtaggttttagtaagatctagctctctccatctggccagatcaactatattcaatccagacatccaagcacaagaatttttatcataactgttttcacccaaataactcttcagc

SEQ ID NO: 636 - DNA, 736 bp, Citrus trifoliata
cacacgcactatcagctatgcctcttcatcaatgtttgttcatcctctggctgatcgctctcgttttggggctggcaaccacagccaatgctacccccgcaatcagtcaacgattcaaagaagcgccacaattctacaactcgccggactgcccctccatcaatagcattgaattcgaactagacgagggggaagagcacatattttgttcggacgaggcagtccacgtggcaatgaccctggacagtgcatacattcgtggctccatggcggcaatcctctcagtactccaacactcctcctgccctcagaacatcgccttccatttcgtcgcctcggccaaggccaacgcgtcactcctacgcgccacaatctccacctctttcccgtacctgaagttccgagtccaccctttcgacgactcatcagtgtcgggcctcatctccacgtccatccggtcggccctcgactgcccgctaaactacgcccggagctacttagccaacctcctgcctctctgcgtgcggcgtgtcgtctacctcgactcagatttagtgctagtggacgacatcgcgaaactggcagctactgatctggccaacagctcggtgctggcagctccagaatactgcaacgcgaatttcacatcgtattttacgccaacgttctggtcaaaccatgcactgtcactgacgttcgcgaacaggaaggcgtgctacttcaacacgggggtgat

SEQ ID NO: 637 - DNA, 681 bp, Citrus reticulata
tttttttttttttttttaaagaacagaaaccgaacaatcttattttttttgtttttctgcccaagcttggggaaatttccttttttacaatcatatattaaaatctcttaacaaaaaaattacattacttgatccacccttcaaattttgggttgggatcgtcaatttctgaactctctttacaaaatatatattatacttgtcgtaaaaacagccgcttccactggaccaaacgccgcaaaaagtctttgacctcggacggttcttgaaaaaagtaaaaggcatgtgtttcctttggagttttaaaaactaaaataccaaaaccctgccctctattacgcaaaaccttgaacgcatcttcatcagttcgatcatctccaatatacaccggtacaacgtctttaaaattagcatatcctaaagcttctaacaaaaattcaagggctttgcctttgtcccatttaatagggggacgaatttctaacaccattctgccttgagttagtgtaagttttggatacttatcaagtactactcttacttgctcggctaatgtaccccagctgttttcatcaacgcaacggaagtgtacggagagacaaaacttgttgttttcaactttagcccccggaattgattttgttttctctaacaatgtctggtacacctcattaatcatcg

SEQ ID NO: 638 - DNA, 760 bp, Citrus sinensis
gggaaatgacacagcagcgacatcgatctttgctgcgcattcgataataatgtttcgtccgagagaggtcttcccattaatcttgttcgtaagttccctcgtgttcttgtccgtggatgctgttagatcatttccgaggattaaattcgatgcttccgtgcaatttctggaggcgccggtgtatcaaacggcctggagtgtccgaatttggccgcaaatggcgagcctgttcacattgccatgacacttgatcctgagtacttgaggggcaccattgctgcagttcactcggttctcaaacacacttcttgcccggaaaacgttttctttcacttcatcgccacggagtcaagttcggcgaacacaaatgacctggcacagactgtccggtctgccttcccttatttgagcttccaagtttatgtgttccgagaaaaattcgtcaccggtttgatctcgtcttctatccgccgtgctcttgacagccccttgaattatgcgagaatttacttagctgacatacttgagccttctatcaaacgcgtaatctacctcgactcggatgtcattgttgtcgatgatatacagaaactctggaggattcccctatccgggggaagaacaatcggagctccagagtactgtcatgcgaattccaccaagtatttctccgatgagttctggtccgaccgcgagttttccagggttttcgaagggaagagaccttgctacttcaatacaggagtgatggtcatgggat

SEQ ID NO: 639 - DNA, 486 bp, Citrus clementina
tgaacgaaccacttacaaacatcacaaaatccgagcagcagaaattagttataggtggtgaagtatgcatgtggggtgaaacagttgatgcatcggatattcagcaaaccatatggccacgagctgcagcagctgcagagcggttatggaccccatatgacaagctggcaaaggaggcaaagcaagttaccggaaggctggcacatttcaggtgtttgctgaatcaaagaggaattgcggctgctccattagctgccgacactccattaactcaaccaggccgctctgctcccctagagcctggttcttgctatttgcaatgatagctgaatcatatctgcaaattttaatgcataaaaaggaaactgatccaaaaccgctcccatcttttatggccttcactgatgaaactgttaatttggggaggaaaacaaatataaagacaaatttggtcttacggaatctgaaataggtcccatcttctgg

SEQ ID NO: 640 - DNA, 792 bp, Citrus sinensis
atgctgctctctctctctctctctctctcttttcactctctgtgtgccctgtttgttttactactcttcagttttcagctgcttcttcttcttaagcacttttttcttttctcatttttttttcaaaaagaaagaaaaacagagcaatatatactctgtttcagcttcttgaagattagatccttaaagctattatcactcgagtaacttccattccattaattcctcaaatggtgagtttcaatattgaagctgagagagaaaacatggggaaccaaaatgtgttgattgttgacgcattcaacctgacactaagtacagaaggcttaccgaacccatcaatttactccatagcatcacaacagaagaggccaccagtggtgccctgcggtggatacactaataagaaaaaattaatgttgcaaaatcttgaaaccaatgctgccgccggagctagacctaataactgttgggttgaatcaatcagggcttcatccccaactcacatgaaatccatcactccttctcttctcgaagagaaacgtgcttggattatacgtcatccgtcagctctggatatgtttcatgaaataacagaggcgtcgaaagggaagcaaatcgttatgttcttggattatgatggcactctttcgcctatagttgagaacccagatcgagctttcatgtccggaaagatgagaagagctgtgaggcaacttgccaaatatttcccaactgctatagtcaccggaagatgcagagacaaggtttatgactttgtgaagctagcag

SEQ ID NO: 641 - DNA, 905 bp, Citrus sinensis
  misc_feature (886)..(886): n is a, c, g, or t
gggcagcgttcccctggctcctacaatgagcaaatgtttaagggattggattttgtgatagctgaggctagaaagtatgggatcaagctcatattgagcttggccaacaactatgatagttttggagggaagaagcagtatgtgaactgggctagaagtcaaggccaattcctcacatctgatgatgatttcttcagaaaccctgttgttaagggttactacaagaaccttatcaagactgttcttaacagatataatacctttactggaattcactacaaagatgacccgacaattatggcatgggagcttatgaatgagccgagatgcacatcagatccctctggaaggaccattcaggcctggataacggaaatggcttcatatgtgaagtccatagacagaaatcacctgctggaagctggtttagaaggattttacggacaatcaacacctcaaagaaagagagtcaatcctaatcttgatattggaacagacttcgttgccaataacctgattcctggcattgattttgcaacagttcattcctaccctgatcaatggttatcaagctcaaatgatcgagatcaactttctttcttgaacaactggctcgacacacacatccaagatgctcagcacattcttcggaagccaatactcctagcagaattcgggaaatcgcggaaagatcctggttatagcacctaccagagagatgtaatgtttaataccgtgtattacaagatttattcttcgactaaaagaggaggtgcagcagctggaggcctgttttggcaacttctgactgaaggaatggacgcttttcgagatggttatgagatagttttgagccaaagcccctcgactgcaaatgttattactncacaggctcacaagttgta

SEQ ID NO: 642 - DNA, 772 bp, Citrus sinensis
gccaccagcaaatcagtatattttgcgcattgtacatcagagatgatattcatcactcatttgctagccgaggaacctgagaagcttgcgggaccattgctggcagacacatatgtaaccttgttaaaaggtcgaaattcatggtacgggcaaatgttagccaagggggagctaagtcgagatatgggtgagaacatcagcggcaaaggaatgattcagggtgtctcggcagtgggagccttctacgaacttctgagtcagtcaagcctgagtgtcttacatcctgaagaaaacaagccggttgctcctgttgagctctgccccatcttgaagactctctacaaaatacttataacaagggagcagtcttcgcatgcaattctgcaagcgctgagggatgaaaccttaaatgatccgcgggaacgcattgagattgcacagagccatgctttttacaggccttcacttctcagccagccatgaatgttttgcaaattttatggagttccaattgaggaacttatgattatacacatagaagcaattgtcagatgaaacatgcaacagaaacatactggtttttgtgatgaatcaattgtgcattgccctctactgtattgtaagcaagttactgatttttgttaatgggattatatgccaattctttttatgtgtaatagttttttttttttccccatcattattgttatgttcacattgtccttttttgagattatcatttttcattgaactacaaaaaaaaaaaaaaaaa

SEQ ID NO: 643 - DNA, 616 bp, Citrus sinensis
tttttttttttagtaataaatcttactgtacttttattgtacttgaatacacttagttaaacttgctcataatttggcatcaaaatgtgaaatatatagataacggactctcattgatatagcctggtctagctctaaaataagtactcaattacagataaaccagaagggctagaccacggcacttgaatagcaaccatgtggccttcatactcaaatgcaacttcgtttccatcaatcttgcaagctcttggtttctcagaagcaaagactctcatttcaccacttcccttcactccaatttccactgaattctcatcatcatcgtaggacaaagactggattgcgccgccggtgttgagcatgttcaccagcccaatgggagcaaactgcacggatggcgatgttcctccaggcagcagagtcacagcagacacagtgatgagctcaaaactgaatggctccaatgatatctcaatgttttcatatggcttggagagaacgagcttcttggcttcttgcaagtacatggcaaagacttgaaccccttcaatggaaattgggttcttgccactgttccattcaatgtcgtttgggttggtcttggctgtcacct

SEQ ID NO: 644 - DNA, 830 bp, Citrus sinensis
ttttttttttttttatgtgtgacatatgcaaattcattattaaaagcctttaaccagagaaaacaaagaaaaaagagaaaagaaggctgcaattatgtaagagacacaaggaaaatgaggcttatcagccatctttattcaataaaatacaaaatgacttaaatcttgattagaaccttgacgcaatcaggttgctttaacagcttaattgcttcgtccaaatcttccaacataacctgatgagtcaaaagttggtcaacttgaagctgcttatttttgcatttgtcaaggataatgggtaactctgattttgttttgatccctccaaaaatggtgcccttcaagttccttcctaaggcaatcgccagaaagttgagtggcactttgtcttccattgctgctccaattgccatcacttttcctttgcccaacttggtggcttcaagggcttccgaaagtaaagatgtaaccccagtgcactcaaacccataatccacacccgttccatgagtcatttccttgaccaattctgaaattgatttatttggttcatcatcaggatttataaaatccgtcattccaaaagcttctcccttgtcttttctatatgggttcttgtctatcccaattattttagctgccccttggattctggctccatcgaccacccctaatccaacagcaccaaggccaaaaacagcaacacttgatcccttttcaactttgaattccttccaagctgcgccaaatccagacgagtatccacatgaaaggaagccagcaagtgaaagatctatacctggatcaactttcacagcataattggcatc

SEQ ID NO: 645 - DNA, 590 bp, Citrus xparadisi
aggattcgccgattgttctagtgtttttcctgtttatattggagatgatacaacagacgaagatgcattcaagattttaagaaaaagaggacaaggcttcggcattcttgtgtctaaatttccaaagaaaaccagtgcttcttattctctacgggaacctgacgaggcaagaattatattttgaattttcatgaacttttaaattattttatactattaaatatatatatatcaaatatatatatatatatatatgtatgtatactgtttatttttgcatgcatggatatgtacattaataattttcctgctcatttttgtaggttatggactttttacaaaagctggttcgctggaaacgagattcggctgatacaacaaagtccaaggtgtaaagcaactagctcagattttagaagaaaattaatgaaaaaatatattaaaaaaattataaatccctaaccattttgaaggaaaatgtctaaggtgggattgatctactagtttaactctatatatgtaatttcttgttcacgataaagaaagtaaaaaaaaaaaaaaaaaaaggaaccagcaaataccgattatgt

SEQ ID NO: 646 - DNA, 775 bp, Citrus sinensis
cagatattaaagatgacttgggcgaatctgtatgcaaagacataggctcttcatcatcatcagccagcggctgctcctatgtccattgtgatgtaaccaaagagaaagatatcgaaaacgccgttaacacggcagtcactcagtacggaaagctagacattatgttcaataacgccggcactgtggatgaagtcaaacctaacatactcgataacgatcaggctgaatttgagcgcatactttccattaacctcgttggcgcatttttggggacgaaacatgctgctagggtgatgaaacccgccggacgaggcagcataatttcaactgcgagcgtttgcggaatcattggtggcgctgcaacacatgcatacgctagttcaaagcatggccttttggggctgatgaagaatactgctgtggagcttggacgatttggcattagggtcaattgtgtgtcaccttatgtggtctcaactccattagctaaggattttctcaagcttgctgatgatggtttgggcggcatgtattcaaatcttaagggggctgttcttgagcctgaggatatagctgaagctgctctttatttggggagtgatgagtctaagtgtgtgagtgggcataatttggtcgtagatggaggatttgctattgtcaatgcagggttttctgtgtttgggaaatctgaatgagtgtattttcggaagcttgcatgttttgatcctaataattcgtaattgagcttcgattttactgctttttactatgcctc

SEQ ID NO: 647 - DNA, 651 bp, Citrus sinensis
gggggagtgaaacagttcaagccttaccagaacaaccaaactagtaactaacattgaaaatttaaaatggctccaaaattttctctagttttgtcagtaacccggcaggcaccggaattaattgttccagcaaggccaacaccgcgtgaattaaagcaactttccgatatagacgaccaagaaagtttcaggtttcatattccagtaatattcctttacaagaataactctgcatcatcacctccattactcaaagaaaaagatcccgtgaaggtcatcaaggaagctataagtgaagcacttgtgtattattacccttttgctggtaggcttatagaaggtcccaaccgcaagcttatggtggattgcaatggtgaagggatcttgtttctcgaggctgaagctaacttcaaacttgagcagcttggcggtgctattcagcctccatgcccgtatttggaacaattgacctataatgttccaggttctgaaggcatccttggttgcccattgctcttaattcaagtgagtcgatcataactaaccattgaatttacttcacatgcatactcaaaataaatagtttcgacattttataaaaaaaaaaaaaaaaaaaaaaagcaaaaaaaaaaaaaaaaaaaaaaaaaaaaa

SEQ ID NO: 648 - DNA, 702 bp, Citrus sinensis
tattgatctagcaatggatgctaaaacactaatgctagcaatctttctcctcttcctgatctcagcatcctccgatgcacacacgcaaaaaatccgagctcgaaaaccttgtaagcatttagtgttttacttccacgacgttatttacaatggcaaaaactctcgcaatgcaacttcagccattgttggctcaccagtttggggcaacaagaccacattggctggccaaagccattttggtgacttagtagtgtttgatgatcccattacacttgacaacaatttacattcaacaccagttggtcgagcacaagggttttacatttatgacaagaaagaaatttttacagcttggcttggcttctcctttgttttcaattctacagagcataagggaagcataaactttgctggggctgatcctttgatgaataagactagagatgtttcagtgattggtggcactggtgattttctcatggctagaggaattgccactttgatgactgatgcctttgaaggagaggtttattttcggcttcgaactgatattaaattgtatgaatgttggtgacattattgattttgtgccctctataattttttttcacttggtgatgtacttgtctcttttcaaatcaatgttttattgttccacaaggggtgggttaatcaaaaaaaaaaaaaaaaaaaaaaaactct

SEQ ID NO: 649 - DNA, 543 bp, Citrus clementina
  misc_feature (3)..(84): n is a, c, g, or t
ccnnnnnnnnnnnnnnnnnnnnnnnnnnnnnnnnnnnnnnnnnnnnnnnnnnnnnnnnnnnnnnnnnnnnnnnnnnnnnnnnnnaaagagggaagacacagaagaggatttggtttttttcatgagggcaggttttagagatagtcccaaatgggggatgctgttttgggaaggagaccaaatggtaagttggcaagctaatgatgggataaagagtgctgttgttggcttactgagcagtggactttctggttatgcttttaaccacagtgatattggaggttactgtgcagtaaacttacctctaatcaaatacagaagaagtgaagagttgctgttgcgatggatggagctaaatgctttcaccaccgttttccggacccatgaagtaagttaaaaatttctttccagaaattcatatacctctttctcgccttctaacaggaggcttctcagaaaggtcttcctgtatgccgtcacctatttctccactacccagatgatgacaaggtgcagagattgagttaccagcagtttttggtg

SEQ ID NO: 650 - DNA, 594 bp, Citrus trifoliata
  misc_feature (573)..(575): n is a, c, g, or t
  misc_feature (577)..(577): n is a, c, g, or t
tccaattcaactctcttggaattacattacttacggtgcggagaagacctagggctaggagaggagttgttgaacaatccagaccttcttgctactgatccagtactatcattcaagtcagcaatctggttctggatgactgcacagccaccaaagccatcgtgccacgaagtcattatcgacgaatggaaaccatcagcaaatgacgtaaacgccggccggcttccgggatacggtctaaccacaaatataatcaacggtggaattgaatgtggccaaggtgggaatgccgctgtacgtaaccgtattgggttctttaccactttctgtggcaagtttgggattcagcctggtgacagtcttgattgctacaaccaacgaccttatggccttaatctgatggcacaatctatgtgatcagcatgatcaacgttttagtaaaataagcttaataaaagctacttaataaaaactttagatgtcacacttgtaggtggacaaccaaactgttacgctcttattgtaagtaaattaaataagactgatccaacatggatcaatgagtcttctccnnnanaaaaaaaaaaaaaaaaa

SEQ ID NO: 651 - DNA, 734 bp, Citrus sinensis; identical to SEQ ID NO: 199
  misc_feature (537)..(537): n is a, c, g, or t

SEQ ID NO: 652 - DNA, 786 bp, Citrus trifoliata
tttttttttttttttttcaattcaaattctgaacttcattattgacttgaggaaactatctattacatgaggctctaccccaagcaagatccaagtaataaaactaaagatcttgataaataacatcggcaaagtgcaataaatatacaccaagtaaatagagtctcagaagcagctagcataatattatacaaatgacatggtttacaaccataagttactaggattgcacggcaagattcttgtgggtatagacgactccttgatcaccatctacgacgtgtccattccctctcaatatcctaaatttacaatgaagaagcaaaatcaggttttatgcactgttgtaaatacacaattcacctggcattctgacgtacattaaataaaagaactaaaaagttatagaagaagggatgctcaggattcctataccatcgagtagttagcaatccttcaactccgactggaccgcgagcatgaatcctgcttgtgcttattccaacctgttactcataaaaaataataacaataataataaatgagaacacgtaatcatccacatcaataccagtactgcaggaaggtcacgtacctctgcaccaagtccaaatcgtgctccatcacagaatcgtgtacttgcattatgaaatactgcagcactgtttacacaagaaaaataagccacatggcaagtttaccaacaacgatgtgccactacttagaaaaatatttgcagaaattgagcagaagaagattagcaactgatgcaatccttctcacctc

SEQ ID NO: 653 - DNA, 787 bp, Citrus sinensis
ggggaagtaactcactcattcagctctctgaaagataacaaaatgagtactccttttgtaactgcaatctccttccttctccttaccttttccacaaaaccgcttgtgggactcgctgatcctttggttgatgtccatggcaacaaggtcgaagcatcccgagactactatttggtctcagcaattcgaggagcaggcggtggcggcctcaccctcttcaggggcagaaacgaactctgcccacttgatgttgtccaactaagttccgactcagaaagaggaacccgtttaggattctcaatgcatgataaaactagtattaccaatggagatgtggatctgaacgtgagattctccacagagactcgctgcaacgaaccaacagtatggagggtcgacagctatgatccatcgagaggaaaatggtttataacaactggtggtgttgaaggaaaccctggagctcaaactttgaaaaactggtttaagtttgagagaattggaagagatcgagctatgtacaagattgttcactgtccttccgtttgcgaatcctgtgtatctttatgcaatgatgttggggtttctaacgatcatgctcgacgtttggctctcactaatgggcgcgcgcttgctgttgttctagtccctggtaacgagagatcagcctcatgtgcgtcttgaatgcccttgtatcattactctaaataatggatcgggctagctccttgacgcttataacataaacaaaaatgtcattgctagctagcctgtgtacctttgaacg

SEQ ID NO: 654 - DNA, 624 bp, Citrus sinensis
gaggtgcatgtcaccatactcgattcatgcaaactacacaggtttctatgggaatgaagatatgccctatcaaggctatgaccacagcaattcaccggattattctagtctcttttgaaaagacaacttggaagatcatttgtaactctcccttttcccaatgtagggacttggcaatctggattgagctccaatacgtaggcagacaagcaggaactagcatacgtgggagtatagtggtctccgggtgtgatatatgggtctgtcgttaagtttgattaactagtgtaccttgttatcatcaatgtatcttcaagacaacgcgttttagatgttggatcttggagcggaaatagcaagtaaaactctttgtcgtgtgttcagggtactggtttgcctgtcagttctggttgctcttgctctattttcacgtttagtaaaaggttttccaggtggtcacttttatcgatttcaccaggagtgggaataataacagtttgtactctctctgttgtaatgtgaaataagctttttgcacaagttaccttgtgatgtatgtttttactgctgcaaaatcttcttaatgtttatattacaattttttgaaaaaaaaaaaaaaaaaaa

SEQ ID NO: 655 - DNA, 654 bp, Citrus sinensis
tttttttttttttttttccccttaaaaaaaaatttctcttgaatttactaaataattaccccttcgggattattgctaaatttcccaaattcatttccttaactctttacaactacatcgtttccaccacttctaccaaaactttctgtcacaagacaacccaaaaaaataaaaaggccgaaagcctcattcactcttgtccaccaaatcactgagtcaactcgctaactcactcaaaacaagtcccgataaaacagtcacaattcacaaatcatccgctttaaacatattaaaaagccggctcggcctcggctcaaaagcggctcggcggcgttgctggtgaaaaaaaggcctaatcaaagcagtcaatgcacgtttgaccaattctccttccactcctccaattctcacaagcgaattcgtcatcgctaatctcctataattcagcctactacttgagtgatgcaaacacaaccccgtcttatgactgttgtagctgttcgtcctcttatgcaaagcgcaccgaaaggagccaggatgcgtagtcggcgaacacccgcaggtcctcttcggggcgttgaacgatgccccattgttgcatttacttatctgtcgcgtgtacaaaatcaaacggccaggggaaatcgggcggtt

SEQ ID NO: 656 - DNA, 654 bp, Citrus aurantium; identical to SEQ ID NO: 213

SEQ ID NO: 657 - DNA, 470 bp, Citrus sinensis
tttttttttttttttttaatattacgtaccgaagtctgttgaaaagtcaagagacaatgcatggtaaaacttgtggtgactggcaatagcatgccaaaagtgaaatttcaaacaaagaagccaacttcaaagctatcacctaccacaaaataaaaaagagaataactttattactaaaaacaaagaagaaaaggaccaaaagcgaaaccgattatatcatcaataatgcatcacatagacattatactgaactgtagcatcccctgttttcggatcaaagttgtgggttctagcttgaacataacctcttgcaaacctgaaaagcccactgcccccaatgactggcatctctctcacctttgaaaacaccgggtttcttcagagcacaatgatgctgctgccattgtatttcccttaaatgaaagcaaaattcatggccattaacaagccaacttcttcttgtgaagcta

SEQ ID NO: 658 - DNA, 517 bp, Citrus trifoliata
cacagcctcgtcaatttcctcagctcattattaacatattatccattttaactttctcaaacaatggcaaagaatgtagctcagtctcctcttgaaaggaccagcttggcttcacttgaccataaactggctatggctaagcgttgctctcatgagggtgtaattgcgggagctaaggcagctgttgttgctaccgtcgctactgccattccaacgctcgctagtgtgaggatgcttccttgggctagagccaacctcaatcacactgctcaagctcttattatctcaacagtggctggagcggcatatttcattgtggctgacaagactgttctggccacagcacgaaaaaactccttccagcaagcctctaacatggaagcataggttttggattgctaattaaatgattatatgattcgcttatgttgtactgcgttatcatcatattccaagaaccaacttaggatgtatatccgttatctatgtataaataaaagatgggtttccattccaa

SEQ ID NO: 659 - DNA, 827 bp, Citrus sinensis; identical to SEQ ID NO: 290

SEQ ID NO: 660 - DNA, 400 bp, Citrus reshni
atgtatctgaccctgcattgtgttaacaggggaagcatgggacttcctcacaattcatctttcaccaagttgagaggcgggatgctttgttcatttctgaagaaattttcaggatccaccatagttttcacatgcaccagcctgtagaaattgttcttgaaatactttttgccccaaacactagcttcctggacgcttgtgtggcctaatttgttatttgttccgatgtcaagatccctataattaatatatgctgttctaggatttttggcgacatagggagtcatataattgaacaacgttctgagcatattgacatgcctttgatatgcgtcatcaattgcttcttgtccccattccgcatagtataaaagtgtgtatatgttgccagctctatgtg

SEQ ID NO: 661 - DNA, 527 bp, Citrus sinensis
ctcaatggtttgtacggttgaaattgtggacgatgtgcgtgctgctattgaccatattcatcaacatggaagtgcccatactgattgcattgttgcagaagatcaaaaagttgctgaaacatttttatgtcaagttgacaggtaagctagttttgcactgcagatcatgatgttataagacatgattatgtcatatctcattagccacaaactatacgatcattgttgatatactttctgtgataatctttgtttttagatattgtgcacttaggaagcatgtgtatgccttttgccgaaaccctaattgctgtattctcctattgaatggcaatcagtaacactggcaacattcttgtttgttcctactttacatggtatctctataaaagaaaaggggattccttttcctgtgaaatatatcaagacatgtttctctttttgccaatttatcatgaatgttaaactacagcaacagcctccaactattgctattctatcacctcaataattctacaattctctca

SEQ ID NO: 662 - DNA, 546 bp, Citrus sinensis; identical to SEQ ID NO: 267

SEQ ID NO: 663 - DNA, 850 bp, Citrus sinensis
ggggctcttccttcggtcttcatttcccagtttctgactttattgctttgcgctcccttcactggttcatttcttcttcttttgttgtttaaggaagccaagcgatagcattatgacttatatatcggagatcaccaatgttatggagtatgaggctcttgcaaaggagaaattgccgaagatggtttatgactactatgcatcaggtgctgaggaccagtggactcttcaggaaaaccgtaatgcattctctaggattctatttcgaccacgcattcttagagatgtaagcaagattgacatgactacaacagtcttgggcttcaacatttccatgcccatcatgattgctccaacggcatttcagaaaatggctcatcctgaaggggagtgtgcaacagcaagggcagcctcagcagctggcacaatcatgacattatcttcatgggccacttccagtgtcgaggaagtttcttcaacgggacctggaattcgctttttccaactctatgtgaccaagcacaggaatgtggacgcacagctagtaaaaagagctgaaagggctggttttagggcgattgcccttaccgtcgatactccaaggcttggccgtcgggaagctgatattaagaacagatttgttttgccgccacatctgactttgaagaactatgagggcttgtatattggcaagatggataagactgatgactctggattagcttcgtatgttgccaaccaaattgaccggtcactgaactggaaggatgtgaagtggcttcaaacaatcacctcactgccaatactcgtgaagggtgttcttactgctgaggatgcaagtctagcaata

SEQ ID NO: 664 - DNA, 870 bp, Citrus trifoliata; identical to SEQ ID NO: 204

SEQ ID NO: 665 - DNA, 328 bp, Citrus clementina
gcggggaacataatcagttgcgtaacaagattttgacaaagaaaaattaatacagccacagtgttcagaaaagatatggcttctttggttactcgtttggtcttggccatggtggtgattgccggaaccctaatgttcggcaacgttcgggtgtcggcgcaatgcggaggaagaatccctcaacttgttgcccaatgctcgcagttcgtcaaaaaagagggaccaaaaatccctccgtcccccggttgccgttctgcggtgaaagctgctaacgtcccttgtgtttgcaccctcgttacgccggctatagagaagcttatcagcatgg

SEQ ID NO: 666 - DNA, 592 bp, Citrus trifoliata
tttttttttttttttttgccctttgatctcctaagtttatgttcacttacaataagaaaagagagacttaaattgacacttgagtaattaagaacccaaactaagtaattaacataacatatataagaatcagaattgggtgcctttctaattctactaataataatagtagtaataatagatttattattattattattattattttgatatattatattaataataataaagtaactaataattatcatacccagagagcgccaatttctacaagcttgggcacgaggtggccgccgatgtggagggcgacgagggactcgaggccaccgacgcacgtgccgccgatgaagactgcgggcgccggcgccggattacgaggggagtcggcgtgagcgctctcatcatggtcaacaagagggagggctgagatctcgtgatcatcgagctcgatgacggtagggtgcaccccgatggtggcgaagagcgttttcatgacgtggcacatgcagcaagacgaccggctgaatattatcaccgggtgctcggatatcaggcgttggattcttgcctccgaggattcttcaccctc

SEQ ID NO: 667 - DNA, 642 bp, Citrus sinensis
  misc_feature (48)..(52): n is a, c, g, or t
ggggggatcaaatctcatagaattcgatccatggctagatttcttccnnnnnttgctacccaaatcatctttctcctctttctcctctcttccttcaccaaaattcaagtccacggctatgccaagaccatgaacaaaaacctaatgggactgaagaaagaagaactaacccattttcaaacctactggcacgacatccaaagtggccaaaaccctacttcaatctcagtagtgaggccacccacaaacacatcaacaaacggttttggcataataaatatgattgataatccactcactgcagggccagaaatgagctcaaaaatggtgggaagggcacaagggttttatgcactagcttcacaggaagaagttgacctgttaatggccatgaattttgctttcattgaagggaaatacaatggcagcagcatcactgtgcttggaagaaacccagtgttttcaaagatgagagagatgccagtcattgggggcagtgggcttttcaggtttgcaagaggttatgttcaagctagaacccacaactttgatccgaaaacaggggatgctacagttcagtataatgtctatgtgatgcattattgatgatataaaaaaaaaaaaaaaaaaaaaaaaaaaaaa

SEQ ID NO: 668 - DNA, 612 bp, Citrus sinensis
tttttttttttttttttgaaagatacaagattacatttttattttgaaaatacagaaagacccgcattgcataacaggatcataaagccttatagcttaggaggaattttcagcaataaagtgtttgatgatttgcattaagcggttggcatcttcagagttgggatcaatggtgaaaaatccatgctgctttccttcaaattcaacatattcaaccttctttccaaaatttttaagtgtctttgcataatcctcagctctgtctttgagcaaatcgcttcccccaacaacaacgagaattggatcaagatccactgcctcaagactagggctgactgggccaaatgggtttattaatggatgatctgttgtctctccaattggtatggagagtctccaaaacctatcaatgagttccaaattgaggaaagcttctctaggaccctcagcttctgatttggtcctcactgttccaccgaaaaagggagcaagaaaaatataacccttcacccgaacaggagctaattccagcgagcgagccttgagacggaccgccaggttatgagcaatgttgccacctgcacaatcaccagatatgaacacttttccaaa

SEQ ID NO: 669 - DNA, 749 bp, Citrus sinensis
ttttttttgaaaagggtatgaacctgaactgacaattcaaccctcatatatatatatatatatgtatatataatttctacaaaatcatatattatataattccttatcaaattctttggtgtattttttttccaccaactttttgactttataatggtatcttctatttgataccgtgacaaccagttcactttctctaatctaatcaatccatctttgtcattttgcagaaaaaataaaaccaataataatcacacacataattctgtacacacgttcacccagctggcttggctagctaagctcaaacatttggttattcttcttctctttccttttgatgatttttctttttttttcttctttttcaattcttttggattgattcattttctcatccttgaaactgaagatgtgggctcagtagtaactgctggttctccatattgtttgaaactgaatagttcaactgaggtagtttttgaatcaagaaactgttagtgcaacttgtgttcgtgttggcgccattgccattgttgaatgaagaatggtgctgctctaaaatccctgaattgaacagcgggttggattcagatcctgtatgactcgtttggttctcggatagaaaattactcagcattgagtagtccattgcatccaataagttggagaaggatgaagatttctgaggattgagagtagtgttgtggcttggtggacttctcaggatcggcaacagggtgtcatga

SEQ ID NO: 670 - DNA, 780 bp, Citrus sinensis
  misc_feature (30)..(32): n is a, c, g, or t
gcggggagtgatcaaatctaagagaattcnnnccatggctagatttcttccaatctttgctacccaaatcatctttctcctctttctcctctcttccttcaccaaaattcaagtccacggctatgccaagaccatgaacaaaaacctaatggggctgaagaaagaaaaactaacccattttcaaatctactggcacgacatccaaagtggccaaaaccctacttcaatctcagtagtgaggccacccacaaacacatcaacaaacggttttggcataataaatatgattgataatccactcactgcagggccagaaatgagctcaaaaatggtgggaagggcacaagggttttatgcactagcttcacaggaagaagttgacctgttaatggccatgaattttgctttcattgaagggaaatacaatggcagcagcatcactgtgcttggaagaaacccagtgttttcaaagatgagagagatgccagtcattgggggcagtgggcttttcaggtttgcaagaggttatgttcaagctagaacccacaactttgatccgaaaacaggggatgctacagtccagtataatgtctatgtgatgcattattgatgatataatcggtttcgcttttggtccttttcttctttgtttttattaataaagttattctcttttttattttgcggtaggtgatagctttgaaatttcaatgatgttgttggccacattaatttgttgattttaaaagaaacatgggttcgctttccgtgttggcacct

SEQ ID NO: 671 - DNA, 470 bp, Citrus clementina
gagttttttttttttttttttctgcaaccattctcattcatcttattatttctcatataatctaatcatctatacattaatgtgtacagagtgtggacgtaaaggccaagtttatttagtggaagtggaaatctctaagattttatcgtcagcagtagccttcatatttccgtccttgtgttcatcatcagcagcaaggctatcttttcttttgccccaaagtacacaataaagccccgcaacaatgaaaaatgtccctatcaaactgctcaagtgaagtctctctgcaaaagcaataatggagaatagagccacaataacgagctgtactggaatgaacattgctgtaaaaactggccctttaacgctaatgcaccatgtttgtaggtaatagactaacgctgagttgagtacaccgcagtacatgaccgtaagaaattgtacgttccaatccaacttccatatggtag

SEQ ID NO: 672 - DNA, 453 bp, Citrus sinensis
tctcagtggaatcctgaccatctatcatttcagatacttggtattaagccgggaactatccccgtctgccactacttcccaacagatcatcttgtcttcgttccagcagctaaagatgagtttatgtaatgtctgattgtattcagcctagtaatgtttggtgtcagtaatgtttaagaggctttgtttgtgtattgtattcagcctagtaatgtttggtgtcagtaatgtttaagaggctttgtttgtgtattgtattcagcctagcttgaaagaataatgtggctgtttattaaaatatgtaccgagtttttcatcctcataaataagtttgatgtttgtaaattaactgtgattttcattgaaatcgtaactccttgcatatcattaattaagggaaaaaaagtatatccatgcttctttgctttcaaaaaaaaaaaaaaaaaaaaaaaa

SEQ ID NO: 673 - DNA, 667 bp, Citrus trifoliata
ccgaattcggcacgagggttacaagccattacccgtaacttaaaatagaggaaatgggtgtaggcacaaaagttctggtgatcacgaccatggcaatatgcctaattagctcagctgcatatgccagggaagggactgccacgttctatactcctccttatgttccctctgcatgcaatggataccaaaatgatggagtcatgatagccgcagcaagctatgcaatatggaacaacggggctgtatgcaacaaaagcttcagagttaagtgtaccggcgcaacaaaccaagggacacctcatccttgccgcggcggcagcgttctggttaagatagtcgacctctgtccggcaggatgccaagcaaccattgatctctctcaagaagctttctcccagatagcgaaccccgatgccggaaagatcaagattgagttcaatcaggcttgaattgaactcccttactgaggaccagctggatggaataagattataataagtcatgcataatacaaaatagctgttctgtttgttctgttttgagtgagaactcatagttgtatgcatgcagaagcttttaaggaatatggctcgctatgtacggcgatgctcattgttctttatttttataaataaataaaaattcttgcaaaagggggggcccggta

SEQ ID NO: 674 - DNA, 861 bp, Citrus trifoliata
tttttttgaagaatcttcttgagttggatttaaagtcaaataattttgtggttcaccttcctcagtgtctcaacaacttgacccatctcaaagttcttgatatttcttacaatcagttacgtggaaactttccttctgccttggccaacctcacatcacttgaatatttggatctctctttcatcgattttcaaggagcattctcaataaattcattggctaatcattcaaagctggaggtcttgctactctcgtcaggaaacgatatgttgcaagtgaaaaccgaaaactggctccccacatatcctctcaaggttctccaattaactcactgccacttaaatgtcaataatagttttcttttacaccaacaccacttaaaattccttgatctctctcacaatcagttggttggcaatttcccaacttggttgttgcaaaacaacacaagattagaagttttgattttgtggaataactcattctcaggaattcttccgcgacttcccaatgccaaatacgataagcttcgttatctagatatttccactaacaatttctctggtaagctaccagaaaatttgggtattgtctttcagaaattgatatatttagatatgtcaaaaaatagttttgaaggtaatattccttattcaatcagtgagatgaaagagttaattactttggatttgtctgaaaataatttttcaggagaattacctcggtctatattctctagttgcctctccttagatacgttggacctatcaaataacaatttctttggccaactttttcccaattatatgaacttgactcatttgcgttccttgcttttgggcaacaatcatttcagtggga

SEQ ID NO: 675 - DNA, 596 bp, Citrus sinensis
ggggatcatcacagcaaagcaaagcaagtttcgtacaataaagagccctctatttccagttttaaattccaagttctaagctcaatcaacatgtcggacacctgcggcaactgcgactgcgctgacaggagccagtgtgtgaagaagggaagcagctatgctgctgacttcgtcgagactgacttgagctttgtcagcaccgttgttgtcatggacgttcaggctgctgagactgaaggtaactgcaagtgcggccccacctgcgcttgtgtgaactgcacttgtggtagtcactaataagcaaacacatgcagcaaaaaataagaagctgcaagtgtgcctaaatattgtgggggttaagaataatgtaagggtgattaaaaaaaaagaaaaattctctacttcgtttttatgatggtctactactagtgtgtggagtgatgtgcgtgttgtgtcacccatcactcgtaatgttttgtgtttccttcttcataatcatgtaatatatggccatggccatgaccgtggccttgtgtggtttaattttaatgtattattgttagtccaaaaaaaaaaaaaaaaaaaaaaaaaaaaaa

SEQ ID NO: 676 - DNA, 847 bp, Citrus sinensis
ttttttttttttttttctttttaattcttttggattgattcattttctcatccttgaaactgaagatgtgggctcagtagtaactgctgggtcaagaatggctggtgtaaatagttgtacggaggatcaaattgatcagtagtgctactactgaaactgcaagtagtgatgaatttctttgatgggtgcaacatgttctcatgatgatctatatttgggtgtgggcgcttgtgctgctggttctccatattgtttgaaactgaatagttcaactgaggtagtttttgaatcaaaaaactgttagtgcaacttgtgttcgtgttggcgccattgccattgccattgttgaatgaagaatggtgctgctctaaaatccctgaattgaacagcgggttggattcagatccggtatgactcgtttggttctcggatagaaaattactcagcattgagtagtccattgcatccaataagttggagaaggatgaagatttctgaggattgagagtagtgttgtggcttggtggacttctcaggatcggcaacagggtgtcatgaaggttaaatttttcctcctcttcttctagatcatgatcacttgctgcaccggctgatgttggcagggagacatgggacttgcggtagatgcggcagagaacccaatcatccaacctcatggaagagtctttgggcctcatcttggtgtgattgagattcttggggttttcagcaaggcgatactcatgcataatccaattagttttaactcccttcggaggcctgcctttgtagaacacaagagctttcttcacaccaatgttttcttgatgagctcccacagatgttg

SEQ ID NO: 677 - DNA, 611 bp, Citrus sinensis
tttggaaaaaaaaggaaacttttattacatccctgtagtgcccatgagcacttcttgatacttcatcagaagttttattttatttatgaactaagtatatagagggataattaattaataaattaaccctattacagcattaagcttcgatcgatcatggaattatagatggtgctttaatcattgcagttcacaaactcgtagctgacagtaaggaagccttgttgatagcctattccattggtgtccaatttcttgaacactccttcgtccaaatctaagcctccattggcacactgatcaacaattctcacaatttgttgggctcctgtaccactgtttgtgacccttaagcacctgccacaagcagcttgtccaatgggtccgcccgaatgacagaaagcagtccagccatatttctggcgccaggccaagggcttgttggcatcccatgttgcgcagaaagcgctcgctgccgtcaagtcccatccaatttgctcagggtggtagagatgatacgtggctctcacattagaagcactttgggcagaagcagctgccaccagtagacaaactgacagaatcacacagagaccgaacctccccatatt

SEQ ID NO: 678 - DNA, 905 bp, Citrus sinensis
ctttttttttaattgattgatctgaacaaagacatctacatcatttgaacaaagtgatagggaatggggacacaatgagacccccagaagagcatgattaacatttgtaggagcatgattgacatttctaggtgatgatatgatcataacgtagtatttaagctgtcacggatgtctccacagcaacctggccggggtacccgacttccgatttcatatcagattcccagagctctggtattgcttccttgatgttgtggatgctttcaaatgcataatctgcacctttaaccctctgtgatttgccaatcagcacagtgtcaagtcccacacgctttccagcctgaatgtttcggacgctatcttcaaagaacaatgttctctgagggttaatgctggcaatcttgagagccttttcaatggctaattcggatggtttgcacacaatgggagtctttggcaatgcaaccaagcttggatttggttgagcaaaatgaccaattatgtcgaaaatttcagggccataggcgctagttgtggtggaagcagccgattccacaaacgcaatgtcatcctcatcatcagaaacattgttcttgtgagtcggattcagagtctcaaagcatataatcccttcaaaacagtcttccaatccgagcctgctgagaactttaacagcatgaactttgtccgcatttgtgaagataattttccttaggggcaggctcagtaaaagactcctcaaaacaggatctggtttcaagttctcataaggcaacctcccatgcacaaaactgtgatagtcatcatagtcaaagtcatagccaatagccctgagtccagccattggtgtcccgtaattcttgtacaacaagttacccaagtcctcaattttgctcctctca

SEQ ID NO: 679 - DNA, 584 bp, Citrus trifoliata
ttctgtcagtttgtctactggtggcagctgcttctgcccaaagtgcttctaatgtgagagccacttatcacctctaccaccctgagcaaattggatgggacttgacggcagcgagcgctttctgcgcaacttgggatgccaacaagcccatggcctggcgccagaaatatggctggaccgctttctgtcattcgggcggacccattggacaagctgcttgtggcaggtgcttaagggtcacaaacagtggtacaggagcccaacaaattgtgagaattgttgatcagtgtgccaatggaggcttagatttggacgaaggagtgttcaagaaattggacaccaatggattaggctatcaacaaggcttccttactgtcagctacgagtttgtgaactgcaatgattaaagcaccatctataattccatgatcgatcgaagcttaatgttgtaatagggttaatttattaattaattatccctctatatatttcgttcataaataaaataaacttctgatgaagtatcaagaagtgctcatgggcactacagttacgtaataaaagtttcttttttttttaacctc

SEQ ID NO: 680 - DNA, 422 bp, Citrus sinensis
gatttatggaatgggcggaatcggaaagacgaagctggcggaagaagttgctaggaaagtcaagagtgaactcttttatcaggtagttcttgttgaggtatcccgtaatcaaaacatacgaaagattcaaggagatgaggtatcccataataaaaacatacgagagattcaaggagaaatagcagataaattaggcctgaagtttcatgaggaaagtgaatcaggaagggcaaacagcttatttaaacgtatagaagcagagaagaagatcctgatattgtggaaaccatattgaaatgggttcattctcaagatttgccttataccgtgaaaataatctaatgttaattgtaacattacataagaacccgcccaaaattatagaacccacaaaaacatcaaagaaaggaaaattttgcctc

SEQ ID NO: 681 - DNA, 600 bp, Citrus sinensis; identical to SEQ ID NO: 203

SEQ ID NO: 682 - DNA, 689 bp, Citrus trifoliata
tttattctgttcatcaaccaatctactactgagtacaaaattaattaaatctgagtgcttcttcaatcaagccatgtgatgctcaattaagccccccattgtctagcatttcagtgaagggttggaatgctctgttcgtgcctgaagaagttaccaggatcaactttggtcttcactcttaccaatctgtagaaattgttcttaaaatactttacaccccaaatcctagcctgattgaaacttgcgttacatttgttgttcatgcccaagtcaagatccctgtaattcacatatgaagccctggggaaccttgaaacataaggagccatgtaattgtaaaggttcctaatccagttcatatgcttgttttgactcttttctccatctagccagagagtcacatactgaatcttgaacaaggttccctttctatgaggaaagggaattgcgttttcaggaatcttgctcatcattccgccatacgggttccatatcatcaatggaccatcttctgccaagaaccttctccataaccccccaagtgcttttgtaggtattggtgttcgaacaaagtctgatttggccttgaaataggccttcggcatagcctttccttggagaagaaactcaggagttgagttgttagggaagccggtcatgtaaatcacagacttgatccagcttgtctc

SEQ ID NO: 683 - DNA, 504 bp, Citrus unshiu
  misc_feature (12)..(12): n is a, c, g, or t
  misc_feature (20)..(20): n is a, c, g, or t
  misc_feature (54)..(54): n is a, c, g, or t
  misc_feature (58)..(58): n is a, c, g, or t
  misc_feature (73)..(73): n is a, c, g, or t
cacctggtgganaatatgcntggggatattgctatattaggcaagtaagccctncgtncgtccgactactgtnatccttactgtccatgtcccttgccagggcaatactatggccgaggtccaattcaactcacttggaattgcaattacttaaggtgcggagaagcctttggggtggacttgttgaacaatccagtacctacttgccactgatccagtactatcatttcaaagtcaagcaatctggttctggatgactgcacagccaccaaaagccattcgtgccaccgaagtcattatcgacgaatggaaaccatcagcaaatgacgtaaacgccggccggcttccgggtatacggtctaaccacaaatataatcaactcggtggaattgaatgtggctatcgttcgggaattgacgctggtacgtaaccgtatttgggttctttaccactttctgttggcaagtttgggattcagcctggtgacaatcttgattgctccaa

SEQ ID NO: 684 - DNA, 650 bp, Citrus xparadisi
  misc_feature (562)..(564): n is a, c, g, or t
  misc_feature (566)..(566): n is a, c, g, or t
  misc_feature (568)..(568): n is a, c, g, or t
  misc_feature (572)..(573): n is a, c, g, or t
gccgagggaacagtctctggtgtcgggcagtatcttaaatctcaaaatcctaatgttaagatctatggagtggaaccagctgaaagtaatatattgaatgggggcaaaccaggtcctcatctcattactggcaatggcgttggattcaaaccagatatactagacatggatgtgatggaaaaggttctcgaggttagcagtgacgatgcagtaaaaatggctagggaactggcattgaaggaagggcttatggttggaatatcatctggtgccaatacagtggcagccctaagactcgctagcatgcctgagaacaaaggcaaacttattgtgactgttcatgcgagctttggggagcgatacttgtcatctgctctgtttcaagaactcaggaaagaagctgagaacatgcaaccagtttcagttgactaatgcttgtatatggggcttgcttatcagaaagctgaacttgtatcaaatttgcttcttgaactctatttgtatgaaatttgatccattcatcagatagtttaagctcttaatataatgattaatgatcaannnananaaannaaaaaaaaaaaaaacctcgagcgcactcacagactctctctctcgttctagatctttcttcggttttccagctttca

SEQ ID NO: 685 - DNA, 818 bp, Citrus sinensis
cattattactatcatcaccactaccaccaccaccaccactaccaccaccatcaccttcatctcaacaggccaaatgcaaggtgatataaatgactgattacaaaagttatcgataaactatcattttgaataaaattaaaggaaaaaaaaaaacataaacacaaatgaacgtacctctccaagatactgcaaattggcttcaatttcagtactgttgacggtcaatttaggacagctcgcaaggtctaactcttccaatgccggccaagttgaataataattttctgaacagaagctgatgagttcggggagatctttaaatcttaattttctcaacgaagggagcgcaagtattgtatttccatctcctacacttatttccctttcattatgatcaaattttgcttcgacaatacattccagtctctcgcagtcactcacttccagacttttaagctgcaccaaacttcgagcttgtgacaacgtgaagatatatgtcaaattgttgcaatctgacacagtcaattctgtaagagattggaggctgatcacatgttgggcgggcgccttccatatccacttcagttctggtaattcccacatagataactctgctaatcttgagagcatcacaggattcccactctttccatgcggcgacttagaggcatccattatgcattctaaatctttacaatcggtgacatgaagaatagtcaactcatttaagccccgttcatctatgcttggcacaatattatgacaacctgttaccccacttaaataaagaatttccagattttgatacagtgctgaaa

SEQ ID NO: 686 - DNA, 830 bp, Citrus sinensis
tttttttttttttttttaaaatttccaactctactacttcaccattgcattttgtttgaatattgtaaaaaaagctgctgttgtatacaaaagtgcaatgcgcttcacttaaacttttgttcaaggagtggaattacaagtctccatatcatatattaactaaccattgggagtaataattacactactattaatacaaattgtacaaaaaaaaaaaaaaataattaagcacaaatgcaaataaacaattgcagagctccttgagtatcaatcttcatgatgtaccgccaaatcatcccaagaacaaaagaacttttctttacaaggtgatgaaacacattcgaagactcaacttatgagtcaccctttggcctaggccctgaaattaagttgctcttatgtataattaattaatttcatgaaactgaatcccgcaatattttgcttaattatgtaattgtcctcttatcaaacgaaaattctttcgttgttacaatatcgatctcatgttgttggctaggccccgggtcatttacacccttgttatattctatgtagaaaccttgttcaatgtggtgtggcgatgagccttcgccgtggaacgtgtgcggcggagacggtgactcggagtccaaatactgctccatggatcttctcggtgacgtctggacgctgtccatttcgccccggtaatggcggaggaggtgcaccggagacatgttgtaggatggggtggatggcctgctggacaaaggtgtcacagaccctttgttttgtttaatttgttttttggctgtatgatgccaattctttagtgctgctgctactct

SEQ ID NO: 687 - DNA, 653 bp, Citrus trifoliata
tttttttttttttttttgaagggaaagcccctttttatttattggctaaattgacaattaccgcaatggcctgcccttttataaaattattgcacattccttggaactaactggctgttttgcttgacttgcttcaaacacttgctccaatggaggaactgtaccccttctgatcatcaaaaaactttgaccaaagcatgacccccccatacttgggcgacgttttgatctgaggaagtacctgaaaagttaacacattcgggggaatataccccctgcctgcggcaacaggaactgctggcagccccaaaaacaacttcccatttctcaatgaagaaacccctctgttaaatgaacttataaaaatctgggtatttcctgaactatactgacaaggggggttgttgtaaaactgaacccctacataatcaaaaagccccgtgttcaaagcagccccccaaaacctatcaggaaatgggcactggggaactgctgttaaataaactttcttgccacggctgctatatgctgaaaaaaaccttgcaagggcatcccaatgcaaagttgaaccttgctcaatatcaaaatcaataccgtccaacacagcagcacctaatggccttgaacttgatgttccccccaaaaaattgttc

SEQ ID NO: 688 - DNA, 430 bp, Citrus unshiu
cgccgagggacgcagtgagtgtatgggccggagaagagaagtactatacgtacgccacgaatacgtgccaagaggggcagcagtgcgggcattatacgcagattgtctggaagaatacgaggagaattggatgtgctcgtgttgtttgtgacaatggtgatgtgtttatgacttgtaactatgaccctgttggtaattatgttggtgaaaggccgtattgatgtcttgtattggtactatatatgaattgggaattggagatatatctgtggacacatggtatggtgtaattaatatttaggtttaattagcatgtattttataaaaatgaagtatattgttcttatggaaattaaaatgttagcgacagtagcaagtatgatggtctgtattcgactatctttactatcaataagagttctacttttat

SEQ ID NO: 689 - DNA, 694 bp, Citrus sinensis; identical to SEQ ID NO: 304

SEQ ID NO: 690 - DNA, 672 bp, Citrus temple
ggccggggaatatccttggggagtggcatgtccaataggatgtgggagaacacagtggagcatgcgaagacatgtgtcttgggtgggaagctttatgtttactatgcagatggaactcagaatactggtgttgtcttcaacaatatttatgagcttcgaggcctcattgatgatgggcagttcgtctccttggaatcccttactcacagccagaagatatcggttgattccttggtgaagagagcatatgataattggcatcaagttttagagtatgacggcaaattcctgagctcgttgactaataatactaagaaggcaattaaatcatcagctgcaccgacagtttccagcaactatgacacaggtcgctgtacctcaacaactcagagcagacagcagtatatgtcatctgagcccagatcacaataccaatctggaaaccaccaacacgctccagttactcagctaattgaatttccatttgtgaggcctgatcagacttcactgatgatactaaataatccacaagcagcgttatcaggcagctttgatcacttgtcagttggaaatgctgcagctgggggttcttattttcagggagattggtctaggccaaggaatgggcatggattggaagactttttggctgaggaaatccgagttaggagt

SEQ ID NO: 691 - DNA, 683 bp, Citrus clementina
ggtgaagccaccacagcacacagttagctttagccaatttgccaccatcatttttttattttaattcttgtaacagaattaattaaacatggccatggcttctgattctggcttgaagatctttgcagtggtggctcttgcaattgctttctgtgtgcaagctactcttggtgtgtttcttcctaaattatgcgaagcacaagggaaaggtgcacggaggagaatgtctgagatcaaaagttccggttatgtggcaccggcaccgctcaagtctgtggcttacttggcagctccactgtcagctcctccaatggcaccgtactaatttgcttctatatattattataattttaaaagatgtagttgttagaataaataaagaaagtgcaccaaggtttttagatgcacgtgaaagcttgagtgcacacagtcactatggtgtgtgcatagtgattgcatgcaggagggtggtgaattgaggagctggtcggagcatatgctgaagagacatgagaattcaatgagattttgctcatatgatgctgcctttcggctagctaactcatatatacatggttttagaagattgtatgatggcgtatggatttataccttttgttctttttgttgtagaaggtttgcaaatttaaagtgattaatgatagtactaaagttcttattat

SEQ ID NO: 692 - DNA, 677 bp, Citrus sinensis
tctctttgatcttcaagagcatatcatttatgaagaagctgctagtaagctcttgaaacttgaattgttcagactttgatcccaaaagtgcccatcaatggtgacctttgaaagcaggaagcagaccaccatgggtgggattaggagcagcagtttgggtgcaaatagcagctgggaatgcatacaatttccctctgtactcacattctttgaaatcggtgcttggatttaaccaacaccagctgaccatgcttggtgttgctaatgatattggtgaaaacatgggcttgcttcctggtcttgcatccaacaagttccctccttggcttgttctcttcattggttccctcgcttgcttctttggttatggtgtcctctggcttgctgttagccgcactgttgaatctttgccttactggttgttatggattgcactttgtgttgccaccaatagtagtgcttggttgggcacggctgtgcttgtaaccaacatgagaaacttccctctcagtcgaggcactgtcgccggcattctcaaaggctatgggggactcagtgctgctgtattcacagaaatttacaacatgctgcttcataattcatcttctaagctactactggtccttgcagttggggttcccgttgtatgtcttgtaatgatgtattttgttaggccc

SEQ ID NO: 693 - DNA, 299 bp, Citrus reshni
gcgggattttgaaagtcagctacggcaacaatttggactgcaacaaccaaagaccctttaatgcttagccgtaacttgtccaagttaatcaataatattaatgatgtgatatgttaattccatcttctaaataataaaataaaagccaacaaatgggggttaattacttgtttgtcaagcatctcgttttatacttgcatgaggcaatagaggtgccttaattgggccttgtaagttaacagtgaaatttcacaaaagcccgtttaaaccatgaaacaaaaaaaaaaacaacctgatta

SEQ ID NO: 694 - DNA, 748 bp, Citrus sinensis
tttttttttttttttttaaaaaaacaaatctagtaatgttgaatatgatgttattatggatcggctttggtcagtgtacctgccaagtgccaaccataactctttttcatcatgactagtctttatttgtttattttattaatacaaaagatttactgacttcaaaaaataaaatacaaaagatttactacttcaaaacagcaatctgaagattaattagaagcgctaatcataattattctaagggattacaggggtaaatcggctacactccactagcgatttctgtcgagcgccctgacagaagaagaaagagaatgggcatcggtacaagcaattatcagccaaccttacattagcagaacccggttggagctccaatagcgaacggggtatggctccgaacaagtagttacctccaagcaacagcctctgaaacggagcgattccgggtccgggtaccgctacccttatggcgtactcggtcggtatcatgcctgtgaacttgttgttttctaaagataatgcagagagctttggcattagagccatgaacaaaggaagcatgccttgaagcttgttgttgcttatgtctgcggctatgagctggctgctgaaaatattattgttattggtgggtgcgggctgttgtatggaagtaaactggttgaatgagagagtgagctgttgaagagagggatggctaaagacaaatgaagggactgagccactgagtttgttgtgactt

SEQ ID NO: 695 - DNA, 581 bp, Citrus aurantium
ccactatataatgaaaaagtgtacaaataataataagctctcagatgagccaaaaaagaaaaaaaagaacaccaagatcaacactcaaaaatcaaaatcaatcaatccccagcggtttggcctcacaagagctctctctgtgttgtgctttctctcattcattctctttacaaatacaaggctcgcaaaaaaaaaaaaaaacgaaattactgaaaacatacataacagattaaaaaagcacgcgccgcgcccgtcccccaattcctgctttgcgacgccatttcgtaattcctttttggctgaaaaattaatatcgcagagttattagcaccattacatatatatatccctgctgaatcccctcctctgttcaccattcgtttccgtggcggtggccgtgggtgattgtaattgactaattgcagccgcgcgctttcagtaaatggagattttgggaatgtggcgtatcagaggccagtcctctcctgtctcctttctgcaacgttcttctaaaatagggcattccctaatcttcaatgcctgcagtgttgtcttctgaaaaaggtgatcgggcagtgctt

SEQ ID NO: 696 - DNA, 809 bp, Citrus sinensis
ttttttgcaatataagattttattcacacattaaaccctaaaaccagaaggcgacctcatcatcattattaacaaataaagcctcattatcaggagggaggagaattcagccagaaatttgaacagccctgacattggatttcttggcctcctccgctttaggaacggtaacagtgagcacaccattctccattgaggccttaatctggtccacctccacattctccggtagcctgaacctccgcgagaacgctccactgctgcgctccacgcgatgccacgtgtcgttcctgtcttccttctcgatcttcctctgcccgcttatctgaagcaccctgtcatcctcgacctcgaccttcacttcctctttcttcacccccggcagatcggccttgaacacgtgggcttccggggtttccttccagtcgacgcgggtgttgacgaaagccgaggtctcttgcgggaactgagatgaggaagagaaatcccagacgtcaagagagaatggatcgaagacactgctgcggcgttttccgaagaagcttggaatcagtttgccagaccttgtagttgtatgcctctcaagtgcgatgcttctcctgaagcaccactgttttctagacctgcaaggatggaaccagcagaatttcgaaattatacactgatgcaacctttgccgcaagattgcaaactatcaacacccgaccttcccaagtttgccaaaccagatggaagaactgtcaaacaagagcagtttggttcgaacaagaaatcaccatcttttaagcctactggaattgagtggtctc

SEQ ID NO: 697 - DNA, 830 bp, Citrus sinensis
ttttttttaatacaatccaagtaattggatctcaagcatatattggaaagctgtatataatcgaactgaaaacattctatcaaagtacaaactgtgagaggcgaatctactgttacagcaatggcacatattcatatatctacttcttacagatcacagtacaaattagaaaaagatataacagatctaatacttctcaaggtttttattccaagccactgcactagatgcgcatgtagtcgtagtagtcagcccagaatgcctctgttctatactatagaataagctcaaggcctgcgagctctctgtttttgttttatggcagagatctttccacaccaagaaaaaggaacctaatcacagtctgtgacaacggataatgcgcatatattacaggatagatgtgtgttgacttgagcttagcagcaaattggagctgcattcatcagagcctaaaaacaaacttactaaagcctgaatggttataagacgtgctcctggaaaactcaacaaaaagttcagaagccaccggtcttcacttcaattatctcacttgtttgaagtttggggtaatctgaaggaacccccagcataaagcatttgataaacaggccttatccttatatttaaaataatgctcaaaatagaaccaacacagcagacaccagccagcacaaaaaaggtgatcctgaagcaatttggacccaagcaggagacgacatttgaagttaacaggttaaacccctgctgctttgctgcctcattatcatatatataccctgccaagagaccagagaaaaggaatgcagcaagaggattccctaatgcta

SEQ ID NO: 698 - DNA, 482 bp, Citrus sinensis
aactaaaaaaaaagtaaaagcaaacaaattcaactttttttttaaaagaaaaaattggacaaagaaaacaaaatcaaacaacacaccacaacatgaaagtataaaactgcaactcttcaaagggattgttgttgagcagtgcagcctgcagcatggaaagaagacgcatgtagttctggcgattgcgttgttcaaggactgcatcctgctaagccagaaggttccccttgttccatttgctttctcccttttagccctccacggacaaccaatggacgataccaagatgctttcttcttctcgggcataattggacttctattgcaaatgaaatcaatctccaagtcaggaatgtccttgatttttggccattctggtccttcagcttccccatctcgacactgttgcgttagcaagggacaattttgaatgaccaaatgttgaagattttcaggaagaccatcctctggaaaggactggag

SEQ ID NO: 699 - DNA, 701 bp, Citrus sinensis
tttttttttaaaaataaaaccgtctacttattttataaacattagaaaataaagaaagtacgttgaaacacacccctaatgtccaatacatatatggaagtacacactacacagagctcaaacacaggtccaatatatatatgtataagaagatgatactagtgagcagcagccaaaagtgcttgtgattgcttctcatagcggaagccatttttctttgaatcatcagcagaccaaacaaaaataccgtggagttgtttctggctcttgagcctgctgcaagcagtgaagaatccatcacctggagccagaccgccactcccgtcactaataaagctcaccaagacctttccgcctttgtaattggagctctgagtcttgaagtaatccatgaactgagacacactggttccttgagcatacgcgtaaaattgaaagttgacataatcaataaggccaccgtagcttttccacaaggccaagtaatggctctgaacttggtcatcatcgtatggtgcgattgaagcaaaagagatggcaccatttttcttgagagttttaattaggcgccctatgcattcagcaaatgtattaggatcggcttggaaatgttcatagtcaatgtcaattccatccaagttgtattctttgatgatacttgtgagtgaagcaaccgcgttagacacccaagtgtctactga

SEQ ID NO: 700 - DNA, 612 bp, Citrus clementina
gaaacctgaacctcatcggccctctccctcacgtctccatccactctctctcccaaaaatacggcccccttatgcacctaaaattcggcctctccccggttgttgtaggctcatcagctgaagtagcagagcttctgctcaagactcatgacattagctttgcttcaaggccagctcttcttgctgggaagtacacaacttacaattactcagcaatgtcaaccgcaccctatggcccatattggcgccaggctcgcaaaatctgcctaatggaacttctcagtgcaaaacgcttggatcagtttgagtacataagggtagaagaaagaaatgctttcctctcggagttgttcaaatcagcttccacacctgttcatctgaaagatcgtctctacacactcaatctcacttggatttgtcggatggtgttggggaaaaggtatacggacgaagctgaaaaaaatactgtgactccaaaagacttcacggaaatgattgaagaattgttcttgcttattggtattttggatattggggactcaattccatggcttgcttcttttgatttacaagggcatgttaagagaatgaaggatgtgagcaagaagcttg

SEQ ID NO: 701 - DNA, 752 bp, Citrus sinensis
aaattgtgctgaatacacaatataatttcttcggttatatttacttgcgatacaagagagatgaatatgaagaatcagaagccaaaagctattgtagttggaggaagcattgctggggaatcatgcgcaaaagcacttgtttcagcaggctgggatgttgttgtgattgagaaaactcgtggacccccaacccaaaacccaaccggtgctggccttggactcgatccattggctcagaaaattgttcagtcatggctccatgaacctgaacttctttacaacaacactttacctatcaccattactgagaacctagcaacagatggggaaaagaagatcagctgggtaataggaagagaagaaggcgctaagtatctgacagcatattgggctgatcttcatggccttatatacaatactctgccacctgaaatatttttatggggtcaccaatacctctctttctgtatttctgaagacaaattaactgtcaaagttagagctaaggatctcgagactgatgaaataatcgagatagtaggagatttgctcgtcggagcagatgggatcctctcatcaattgttcagagcattctacctgacttcaaattgaggtacacaggatactgtgcgtggagaggtgtttttaatttttcagaaaacgattcataaaccatcttaggcattcggaaatcgtatcctgatattgggaaatgcttttacacgaatattggttcaggatctcacatctt

SEQ ID NO: 702 - DNA, 585 bp, Citrus reticulata
aggcaacattattatccatgggttaaacatacacgactgcaaaaaggggggcaacgctatggtgagggactcaccgagacacttcggatggaggacagtatcccacggtgatggtgtctccatattctgtgggacccacttctgggatgatcactgctcgttatccaactgtgatgatggactggacgatgccgttcatggggccacgggtatcactatttccaacaatttcatgacccgccatgataaggtgatgttattgggtcacagcgatacctactctcaggacaagaacatgcaagccactattgcctttaatcacttcggagaagggcttgtccaaggaattccaagatgcagacatggctacttccatgtggtgaacaatgactacactcattgggaaatgtatgccattggaggcagtgctaaccctaccatcaacagccaaggaaatatatttgctgcccctgacagggcgttcatcaaagaagatgacaaaacatgaggatgcaccataaagtgaatggaggaattggaactggagatcacagggggacttgatggtgaacggtgcatttttta

SEQ ID NO: 703 - DNA, 769 bp, Citrus trifoliata
aggaattctggcacgaagggtcgtgtttggtgcaagagaaccgctcattcgaccacatgctcggctggttcaagtcactcaacccagagatcgacggcgtcaccggttcagaatccaacccaatctccgcctccgacccgaactccacccacctacagttcaagaacacggcagctcacatcgacccagatcctggacactcattccaggccatatacgagcaagttttcggcaagccatgggactggaacaacccggacccgaatcccgggacgggtccgaagatgaatggattcgtgcagaatgctgagagcatacagaaagggatgggggagattgttatgaacgggtttaagcctgaaactttgcccgtttataaagagttggcgactgagtttgctgtctgtgatcggtggttttcctcgataccgagttcgactcagtcgaataggctgtatttgcattcagcgacgtcgcatggagctacaagtaacgataggaataagcttattgcggggtatcctcagaagactgtttttgagtccttggaagaaaatgggcaaagctttgggatttattatcagtctttttcggcctgctttttctacaagaatcttaggaaattaaagtacatagacaatttccatcaatttgatgtaagcttcaagaggcattgcaaaagaagggaagctgccaaactatgtggtgatagagccaagatattttgacttgttatcagtggccgcgaatgatgatcaccctaagcacg

SEQ ID NO: 704 - DNA, 859 bp, Citrus sinensis
  misc_feature (14)..(14): n is a, c, g, or t
tttttttcaactantgtgattttgggggatctcattaattatcattaaccaaagataaaactcactaaaattatacatatgagattatattaaaaatttagaagaacagcatatcatcgaagaactggtcttaaattttatgcaaagaaagccataaaaagcaagccacggattagatcaaatggcaaaagcttgattgcttttaaactttcatcttgttctttttagttctccgaataagtgacatgatttcagtgctctgaaatgatctgcgtaagctcctgcgtccaggattccgattacccagctggaaatgaaaaatgggatttggacctttagccagaattgagatgccatctcgaacaggcaaaagtacgcgagctgatgctaaattaggatcacattcgacgacagaatttttgaatttgtcgacagaattcttcgatggtagattcttaattgcagatgacttgtcagcgaacgtatacatgaaaagtggcacatcctgtatgtcaaattcttgcttatctgtgatttttgcattactcggaaacctgcagtcccacgatggtgcagaaggtccctggtatccagacttctcatttgatctaccaacatcctcgattggtgctgacaaataacgccggtgatatcttggcagaactacattccacttaactctgttcagagcaagcttgtgtgcatacagctcacatgagagaagcctttgtttgagggagttgattcgaagctccgcctcagaatacgcattactattaggaatgcagttatcaagattagcggagacgtttcccagatgatcaacaacggtgattaaagcgttgcatatgtactcttt

SEQ ID NO: 705 - DNA, 810 bp, Citrus trifoliata
tttttttttttttttttcagaaatcgaaaatcatttattaccagcaagatttattattatacgctagacatatggctttaacagtcacattaccaatacatttttaatcatggtagataggtgctggaatgtatacaatattatcagcctggaagaaatggcagacgtgggagctccctggctcgatccctagcacacgaaacgatgcatgatctcgactccaatgagacgtatccatgtggcaaactgctacagcttccactctatctccattatcaccacctaatgaaacaccgaataacttgttctcagtcatttggctgtggcagtagaagattgcataagggtaaggcatgatatgacatgccaccatcttgggagcaaacattggtttaggcacttgtaaaatagtgtaattttggaaaatggtagttgattttgtgagtaattttgtgcttagaacttggaatttggtctccaatccgaaagttccgtgtacaaaatcaagcatggattccaaagaggtagcacaaattttggtttctccttcgatgggaggaacttcgcaatgattcagggtcccttccatggctttggctaggggtgagtcatctgagaacgagaagaattgaagaaggtaaggcagttgtttcaatgaaaatggaatggaatctgcttcttctctaggcaaagcctgaggataagctgagggatctctcttgcgaaaataaatctgcatcgtttcgccaatctttagatccttcaaggtgaagaacaccatcgttgaagggtccatgtgattcatgtggg

SEQ ID NO: 706 - DNA, 552 bp, Citrus clementina
gcttccggtttcatttcgggatcaggaaactcccacttgtttgggttccatatgctactctatcacttgtgggataatggcaggactttgcatcatagcaatggtaatgagtttgattgtcgttcataggactaagagtgtttatgctcaactctacgggaatcttaacagaagcaacagatgattgttttacatagatatgcaggtgcaaagagttttatcgagcgtatcttgggctgcaagcatttttgctgctcataatccttctgaaccaacagtcgaaggcagtccttgattacattgcatatttaatgaaacaggctgtgtaaggacatctgcttcaaatttggattgaagttatttcttgtgtagagcatttaattctatgtatttgacccttaaaccagttatgattgcttgcggccctgcaggtttttttttcatctgtagcaggatcatgcttcctttgtttagttcacaatgtgtaccattatcacatttaattgacatttatctttcaaaaaaaaaaaaaaaaaacactgggggggggcc

SEQ ID NO: 707 - DNA, 656 bp, Citrus jambhiri
ggaccacagcaaggaaacacacagatccaaactccaaacacaaatacataattccaaaaaaacccaacaatgggccagtactcatttatagtactcttgtttcagctcattttgtgcagccaccggattgtgaccgacgcagcgggtggcgggtggcaactcctccagaaaagcattggcatatcatccatgcacatgcaactcctcaacaacgaccgtgtcgtaatgttcgatcgatctgacttcggaccatcaaatttatcattaccccctggcaagtgccttaagactgactgcactgctcattccgttgagtacaacgttttgaccaacgagtttcggcctctttttgtgcaaagcaacgtatggtgctcctcaggcgctgtgaggcctgatggcgtcttgatccagaccggtggattcaatgatggcgaaaaaaagatcagaagtttcgtgccttgtaacgatgaatcctgtgattggaaagaaattgacggacttggtgctagaagatggtacgccactgatcatatattgcctgatggtaggataattatcattggcgggagaaggcaatttaattacaattttatccgaaaatgggctccgaacgtgtacagcttaccattcttggtccaaacaaatgatcctagagt

SEQ ID NO: 708 - DNA, 801 bp, Citrus sinensis
cggctgaacaccgtgtcagccaggctggaggagctgtatgtccaggaggactgtgttgcagcaaatttggcttctgcggcaacactcctgcttattgcactggtggctgccaaagccagtgcagtgggtcaccctcacccaggccgactaaaccgactcccgtacctgctcctagcggcggcgggaacaatatcggttcactaattagcagggacctatttgaacagctgttgaagcatcgtaatgatgcagcttgccaaggaaaaggtttttacacttacgacgctttcatcgctgccgccaaatcctttggtgccttcggaacaaccggtgacaccgatactcgcaaaagagaaatcgctgcctttttggctcaaacttcacatgaaactacaggtggctggcctactgcgcccgatggtccatatgcatggggatattgcttcaagcaggaacaaggaaaccctggagattattgtcaaccaagtcaacaatggccatgtgcacctgggaaaaagtattttggtcgaggtcccatccagatttcatacaactacaactacggtccagcaggaaaagccataaacgttgacttgcttggcaacccagatgctgtggcaaatgatcctactatttcgttcaagactgctttctggttctggatgaccccacagtcaccaaaaccttcatgccacgatgttatcacaggccaatggaagccatcagcctccgacactcaagctggtcgccttcccggttatggggttgtcaccaacatcatcaatggtggcattgaatgtg

SEQ ID NO: 709 - DNA, 259 bp, Citrus trifoliata
tatcaaactaatatttttattcaaatctttttcacttgcattaacaagaagttcactctgttctcattactaacaaaatccagcagtactagtagtcaaaccacacagatcaaaccaattaccatagcagataacagggattcacgcatacagttaattgttccaactcttacagctttgaagtcgcgtctttgtcaagaaaccaagtgaattcttcttcagccgacgccatttgaactggcagcaaatcagagttttg

SEQ ID NO: 710 - DNA, 880 bp, Citrus sinensis
  misc_feature (799)..(799): n is a, c, g, or t
  misc_feature (831)..(833): n is a, c, g, or t
ggggatagagattttcctgctactgttaagcttggaactggcaggactataactggagtttcactgtataaaggcaggagggctttgttgccaaataagcaatatcctgtggtttatatgggaagcaactcaagcaactcaagctctttgtgcttggagggaactttgaatccgaccacggttgccggaaaaattgtgatttgtgaccgcggtattagtcctcgagtgcaaaagggtcaagttgtgaaagatgccggaggaattggcgtgattcttgcaaatacagcagcaaacggagaggagctagttgcagattgtcacttactgccaacagttgctgtgggagaaattgaagggaaagagattaagcaatacgcattgacaagtccaaaagcaacggcatctctagcattgctaggcaccagagtgggcattaagccgtccccagtagtggcagcattttcctccagagggccaaatttccttacacttgaaattctgaaacctgatattgtggcacccggagtgaacattcttgctgcttggagtggtgagacagggccatcaagcttgccggcggatcaccggagagtgaagtttaacatattgtctggaacttcaatgtcttgccctcatgtgagtggaattgcagctctgctcaaggcaaggcatccggaatggagtccagcggcaatcaaatctgccctcatgacaacagcttatgttcatgataacacacacaatcctcttaaagatgcctcatcatatgaaccttcaagtccgtatgaccacggtgcangacacataaatccagtgaaagcactggacccnnntttgatttatgacattaatgcacaggattacttcgatttcctctgct

SEQ ID NO: 711 - DNA, 690 bp, Citrus sinensis
ctgatgtaatcaacagtttcgcatacaacgttaagagtatatacaattccggagggaggtcattttggattcacaacacaggacctttgggttgctatgcttttgtttttttatattctccttcagcaccagcgttgaaggactctgcgggctgcgtaaagccgtacaatgaattagctcaatatttcaatctcaagttgaaggaagctgtagttcaactcaggaaagcttttccttcggctgcatttacttatgttgatgtctactccatcaagtactccctatttaaggaacccgaaaaatatggatttgagcttccattggtagcttgctgcgggtatggtggcattgacaagtacaacttcagccttaatgccgtatgtggagcatcaggtcttgtgaacggcaccaaaatagttgtggattcgtcgtgcgaccgcccttctgctcgagtaagctgggatggagttcacttcacagaggctgctaacaagtttattttcgaccaaatctcaactggagatttctcagatcctcctattcccccaaatatggcatgccacagagagggccagctcaaggcacttggccaaaatgctttagtcaatatttcttaaatcttgctcagaaaagaatgatcatgcaccatgtacaacaagcactcaaaataaagtgtaacttgagtgcttc

SEQ ID NO: 712 - DNA, 747 bp, Citrus trifoliata
ggactaccacttaaactaattcttttcacaactgattatttttacagtacaactaacactaattattttaaaagttacaatattgccaaactaccccttataaagcacttttgtgacataaaagccgaaaaaaaagaagtaattaacttataaacatatttaataaaaaaataaacctatgaaatgaatcaaaagttttacaagccttttgtccaaccatcaacgcactccaatctatctctatgaagattcatcagcttcaacacctcactcgccttctcctttgtcctctcggcgcaaccaacctgcaaaagcactaatagcttctggaaagcacccacttgaagcgcttcaacaaaagcagttttctcttctctcttttcattcatgcatagcttccaaagaatcgagaccgacaactctgttgccaactccgaaacacgcagtattttcttcactacaaccggcattgttaaaggtttatcgttggcattttctctcccacaatcagtgctgcaaattccatcaagaacactcaacgccttctcgcatacgcttctttgtgcatcaacaagcatttccagcagcaatgaaaccaaccccatgtcgacaaatttttgtattagcttctcatttactgaagctgatgatgcgatcgtatgatagatgacgaccaaagcagctttagtggcagtagggctgatgggctcttctatcagcttaaataatgcttcatggctccttcat

SEQ ID NO: 713 - DNA, 744 bp, Citrus sinensis
tttttttttcataataatcattattgataaaattaaactgaaaattataagtagataaaaaatgaactatgactgttgcagtaaacagaacctattccctcgtgttacgatgctcacatggtatgagcatgtctttggctactgagtcagcattcactggcccaaatttgcttgattctttcctctacaaggtggcaatggcttgccacataagcacagattgtgagcataagctgatccaggaaagatgctgtaaggtctcccttgtgggatctctccacatagtctgtttgccctgaagtttgcatgtctcagtcctcgaatccccaacaagctggttggaatttttcctgtgagtgaattgactgatacatcaagccattgaagctttgacaatagccctaagcttgtagggatggtgcctgctatctggttcctttgaatatcaagcatttcaagttcaataagatttgatattgaacttggaatgtggcctgtaatcttgttgcttcctatgttcagcactttcaagctcaacccttctgtgaattctggaatctcacccgaaaagtgattgcctgacacatctaaagcctccaaaaagctgcttgtcctgttgtttatgatgctagagagagaccctgtaatctgattagagtgcagatcaatagaagcaagcccgtccgggaatctaatctctgaaacatcaaacttcaactggttgttcgaaagtttgatgttctg

SEQ ID NO: 714 - DNA, 812 bp, Citrus sinensis
caaaagcccatcaaaagtcacttctaaaatttcaacttaaacttcatatcaatggattgcatatcgagtcaaggcgagctgctcactcacactcagacaacgaagttcaactacagattagcaacgagcagccctaagaagcgagcggggcggagagtgtttagagagacacgtcatccgattttcagaggagtcagaatgagaaacaataacaaatgggtatgcgagctgcgtgaacccaacaagaaatcacgcatttggctaggtacttatcctacgccagaaatggctgcgagggcacatgatgtggcagcattagccctgagagggaaatccacgtgcctgaatttcgctgactcggcatggaggttgccggtgccggcttcggcggatgctgatgatgtaagaaaggctgcagctgaggcagcagaagcattcaggctgtcccatgatgatgaagatcaatttgaagaaaatggtttgttgccggagaaaaatgtgttttacatggatgaagaggcggtttttgatatgccgggactgcttgtgaacatggcggagggtttgcttctttcaccaccgccactacttattggatgtgagtatgatgatgatgatgatacgaagtggaatgattatatatggggacattgaagtaatagctagctctgtgtcgttgcctcattgcctgtggatcggagtccttcgatttgatgtgcgtctagttaattaatgctgtagagttgtgtttctttttgttctgtctgtttagtttcagcaattaggaaatcttcaaacaattaggatacaaa

SEQ ID NO: 715 - DNA, 24 bp, Citrus artificial
aagtcgagcgagtacgcaagtact

SEQ ID NO: 716 - DNA, 24 bp, Citrus artificial
ccaacttaatgatggcaaatatag

SEQ ID NO: 717 - DNA, 23 bp, Citrus artificial
tataaggttgacctttcgagttt

SEQ ID NO: 718 - DNA, 25 bp, Citrus artificial
acaaaagcagaaatagcacgaacaa

SEQ ID NO: 719 - DNA, 20 bp, Citrus artificial
caatcgtgggaggctctaag

SEQ ID NO: 720 - DNA, 19 bp, Citrus artificial
ccatgccctgtgctactaa

SEQ ID NO: 721 - DNA, 1697 bp, Citrus clementina
agaacttgcagcagcacaagcacaagcacaaagcacatacacacgtatacaatttctcttctctccggcttcgggtacaaaacttgtcgaattcgttgaattacccccctaccattcgcattcttcacaaaaacacaatgatctcttcagttaagcacaccccattttcagcatccacagatttcttgccaaagaaacgttttttaaccccaacgctaaagttctctccgctacccatcatccaaaattcaatctttaacaacaaattctcttcagaaaagcctcttcatatttcatcaactcaaaatctcacattttctccaaaagagcaacaaaaagagcttaaaacacagtgcaatgcctatgaggctgacaggtcacgtcctctggacataaacatcgaggttcttgatgagcaggctcggtttgaggctgcccagaggctcaaaattggcatatattttgccacatggtgggctttgaatgtggtgtttaatatctataacaaaaaagtgttgaatgcttttccttatccttggcttacttctactctttcactggcttgtggctctctcatgatgttggtttcttgggccaccagaatcgctgaagcccctaaaaccgatcttgagttctggaagagtttgtttcctgttgcagtggcacatacaattgggcatgtagcagcaaccgtaagtatgtcaaaagttgcagtttcattcactcacatcatcaagagtggtgagcctgcattcagtgtattggtttcaaggttcttgttcggtgagacacttcccatgccggtttatatgtcactcctgccgattattggaggctgtgcccttgctgctgttacagagctcaacttcaacatgattggatttatgggagctatgatatcgaatttggcattcgtgtttcggaacattttctccaagaaagggatgaagggaaagtctgttggtgggatgaactattatgcttgtttgtctatgatgtctcttttgattctcacaccatttgcaattgctgtggagggccctcagatgtgggctgctggctggcaaaaggctattgctcaaattggtcccaactttgtgtggtgggtagcggcacagagtatcttctatcacttgtacaaccaagtttcatacatgtctctcgatcaaatttctccattgacattcagcattggcaacacaatgaagcgaatctctgtcatagtctcctccatcatcatcttccacacgccagttcaacccgtcaatgctcttggagccgccattgcaatactcggcaccttcatctattcacaggcaaagcagtgaacgtgtgaaggattttgaggtggttttgccgcatagtctatgagttctgctggaactattcgcatcgaagtctgacagaagattgattgaaaaaaaaaaaaaaaaaagacgcggctacagtggacggaatgatgcttttattccttgtaatcaagagtagtatctataatattctcatgatgcttgcagccagataagtgtacaaggtttttttcacccgagagcagattgtgggttaatgcctttgttgtaaataagaataaatgagttactgagctgtaatgatgttaatagagttatttattcattcatttatttccctttcccttcattaagattaatgcaaaaaattacatattacagttctcc

SEQ ID NO: 722 - DNA, 2115 bp, Citrus sinensis; identical to SEQ ID NO: 574

SEQ ID NO: 723 - DNA, 1703 bp, Citrus sinensis; identical to SEQ ID NO: 571

SEQ ID NO: 724 - DNA, 2206 bp, Citrus clementina; identical to SEQ ID NO: 572

SEQ ID NO: 725 - DNA, 1240 bp, Citrus clementina
atggccagaaaaacaatgttcctctttattttcttttgttttttttttattctcctccccctctcagcttctgcagaatgcaagtgtgatctcactgaaaccaccggcggcagtggccacaaaaacaaagctttgaaattgaaaatcgttgcgattctatcaatcctgattgcgggtgctttcggtgtttcaattccaagctttggaaaaaacatctcaacttttcatcctgagaacaatattttcttcataatcaaagcctttgccgccggtgtgattcttgccacaggctttgtccacatactgcctgatgcgtatgagagtctaactagtccttgcttaagcccaaaaccatggcaggatttccctttcaccgggtttgtggcaatggtttccgcgattttgactatgatggttgatgcatttgccacatctttttatcaacgtttgcattttagtaaggctttgcctgttaatgatgatgacaaggagatgcatgcagagcatgaaggtcatgttcatgtacatacacatgccacgcacggccatgcgcatggctctgcttttgcatcgtcggatgcttctggttctgggacttctgatcttttccgacaccgaattgtatcacaggtattagagttggggatagttgtgcattcggtgatcattgggatttcattgggtgcatccggaagtgtaaagacaatcaagcccctcgtagcagcactaacttttcaccagttctttgaaggcatgggccttggtggatgcatctctcaggcaaagttcaagtcaaaatccatagtggcaatgatacttttcttttccctgaccactcccgtcgggattggaattgggattgggatatcaaaagtttacaaagagaatagcccaacagctcttgttattgaaggcattttcaactctgcttcagctggaatcttgatctatatggcgcttgtggatcttcttgcaacggattttatgagtcctaagttgcaaaccaatttcaagttgcagcttggagctaatttttctcttcttttaggctcaggttgcatgtctctcttggctaaatgggcctaaaattcacagccatgctttcgccctcctgtgtttacgaaatgcaaacttgttcgtgccttattgcaacttaaagcgtaattgccttcatgtaaaatataatattaagggttaagtatctgtgggtaacacttgttttgacatattataaaaggat

SEQ ID NO: 726 - DNA, 692 bp, Citrus clementina
agttacaaacacttcttgaaggatgggcatttgcactccgacaataaatactatccatggaagcacaatcacaagaaaagcaaaacctggagcctgttatagaagcttcattaccaccatcaaatcaattttccggggataatttttccgagaagttgtctgagctagacactttggaatcattggtattatcgagcaaccacaacagaaaatttcccagaaaaattagcagcattcccactccttctgagagcagccaaaatactaaaaatatgagcattttttcttcagaagaaaagcagtcttgtgggttgatttctgattcttatcgacacattttgtcgaataaaaaaagaattacgtggactaaggatctgcatgaacattttgtcgagtgtgttaatcgccttggaggttctgagaaggcaacaccaaaggcgatactgaaactgatgaaatcgaaagaattgagtatcctacaagtaaaaagtcatttgcagaaatatcgatccgagaagctcatatcagaccagtctttacaaggatttcccgagaaaacagtttgtatcaatgatatacctcagctttacatgaaaatgagcatgcaaataagagaggcacttcaattgcagctagaactcgagaagcatcttcatgatcaattagaggcatgtacttctatagaactttaa

SEQ ID NO: 727 - DNA, 1411 bp, Citrus clementina; identical to SEQ ID NO: 578

SEQ ID NO: 728 - DNA, 617 bp, Citrus sinensis; identical to SEQ ID NO: 577

SEQ ID NO: 729 - DNA, 1777 bp, Citrus sinensis
aacctttttcctcatcactctttgccctccctcttttcttgcttgctctgcggctaggtttcaattgtctcttcgaagtttcagttaatttaacagccatgggtaaggagaagactcacatcaacattgtggtgattggccatgtcgactctggaaagtcgaccaccaccggacacttgatctacaagcttggtggtattgacaagcgtgtgatcgagaggttcgagaaggaagctgctgagatgaacaagaggtcattcaagtacgcctgggtgctcgacaagctcaaggctgagcgtgaacgtggtattaccattgatattgccttgtggaagttcgagaccaccaagtactactgcaccgtcattgatgctcccggacatcgtgactttatcaagaacatgattaccggtacctcacaggctgactgtgccgtccttatcattgactccaccaccggtggttttgaagctggtatctccaaggatggtcagactcgtgagcatgctttgcttgctttcacccttggtgtgaagcagatgatttgctgctgtaacaagatggacgccaccacccccaagtactcaaaggctaggtacgatgaaattgtgaaggaggtctcttcctacctgaagaaggttggatacaaccccgagaaagtcccattcgtgcccatctctggtttcgagggtgacaacatgattgagaggtctaccaaccttgactggtacaagggtccaaccctgctggacgctcttgacaatatcaatgagccgaagaggccctcagacaagccccttcgtctgccactccaggacgtgtacaagattggtggcattggaaccgtcccagtgggtcgcgttgagaccggtgtcctcaagcctggtatggtggtgacatttggcccctctggattgacaactgaggttaagtctgttgagatgcaccacgaagctctgcaggaggcccttccgggtgacaatgttggcttcaacgtgaagaacgttgctgtcaaggatctcaagcgtggttttgttgcttccaactcgaaggatgatccggccagggaagctgccaacttcacctcacaggtcatcatcatgaaccaccctggccagattggaaatggatatgccccagtgcttgactgccacacctcccacattgccgtcaagttttctgagctcgtgacgaagattgataggcgatcaggcaaggagcttgagaaggagcccaagttcttgaagaatggagatgctggaatggttaagatgattcccaccaagcccatggttgttgaaaccttctctgactacccacctcttggtcgttttgccgttagggacatgcgtcagactgttgctgttggtgtgattaagaatgttgaaaagaaggatccaacaggtgccaaggtcaccaagtctgcagccaagaagaagtgaatcgggttggttaatgttgctttatccgcagatggagtctattttaataattgtagttatacaaacttggttatttttggtactgttatagttcgatgcatgctttcctttttaggttttagtttgttgcctttggtgtcgggtaccgattcccagaattgggtgcttgacaggcggtggcgcagctctaacctggagtctcaattttattaatagttatggtctttgtttgtattgatacttgaggtggttcggtttcatctgaatcggctcagaagttttgtcattgtgttgtttctgcggaattgatatctacttttcgtttttctattcta

SEQ ID NO: 730 - DNA, 1488 bp, Citrus sinensis
tttttttaaaacaagagggcgggtagcttaacgcacagcgcaaagtccgttagtgagagagagaatcagaacagaaacaaaaggaagaaaaaaaaattatttttttttagaaattcgaagttagaaaatggcagatactgaggatattcagcctcttgtttgtgacaatgggactggaatggtgaaggctggatttgctggagatgatgctccaagagctgtgttccccagcattgtgggtcgccctcgccacactggagttatggttggtatgggtcagaaagatgcctatgttggtgatgaggctcaatccaaaagaggtattttgactttgaaatacccaatcgagcatggcattgttagcaactgggacgatatggagaaaatctggcatcacacattttataatgagcttcgtgtggctccggaagagcatccggttcttctcactgaggctccccttaatccgaaggccaatcgtgagaagatgacacagattatgtttgagacctttaacacccctgctatgtatgttgctatccaggctgtgctttctctctatgctagcggtcgtacaactggtattgttctggactctggagatggtgtcagccacacagttcccatctatgaaggttatgcccttccacatgccatcctccgactggacctggcaggtcgtgaccttacagacgcccttatgaaaatcttaaccgagcgtggttattctttcaccacaactgctgagcgggaaattgttagggacatgaaggagaaattagcctacattgcgcttgactatgaacaagagctagagacagcaaagaccagctcagctgtggagaagagctatgaactacctgatgggcaggtcatcactattggggctgaacgattcaggtgtccagaagtcctcttccaaccatccatgatcgggatggaagctgctggcattcatgaaacaacatacaactccattatgaagtgtgatgtcgatatcagaaaggatctctatggcaatattgtccttagtggtggctccaccatgttcccaggtattgctgacagaatgagcaaggagatcactgcattggctccaagtagcatgaagatcaaggtggtagcaccaccagagaggaagtacagtgtctggataggaggctcgatattggcttccctcagcaccttccagcagatgtggatcgcaaaggcagaatatgatgagtctggaccatcaattgtccacagaaaatgcttctaatcgtggaaagagaaatgctatgaggaaacatataccagacattttgtattaaggaaaggcttcttccaatcaagcggttgttcgaagtttcttttttctccttttttctcatccttttcgttcttgtttctttttcgtgttttcgtcctttgatgtctgaacaatgaatatggggggattcaattctttacattattatttgttagtagaagagtattggattgtta
